(19) United States
(12) Patent Application Publication
(10) Pub. No.: US 2004/0156832 A1
(43) Pub. Date: Aug. 12, 2004

(54) Immunoglobulin compositions and methods

(75) Inventor: Chris Jolly, Stanmore (AU)

Correspondence Address: SPECKMAN LAW GROUP PLLC, 1501 WESTERN AVE, SEATTLE, WA, 98101, US

(73) Assignees: CENTEC LIMITED, Newtown (AU); CENTENARY INSTITUTE OF CANCER MEDICINE AND CELL BIOLOGY, Camperdown (AU)

(21) Appl. No.: 10/672,764

(22) Filed: Sep. 26, 2003

Related U.S. Application Data
(60) Provisional application No. 60/415,024, filed on Sep. 30, 2002.

(51) Int. Cl. A61K 48/00; C12N 15/85; C12N 5/08

(52) U.S. Cl. 424/93.21; 435/455; 435/372

(57) ABSTRACT

Provided are methods for the preparation of immunoglobulins, including fully-human immunoglobulins, and immunoglobulins and compositions comprising immunoglobulins prepared by these methods. Also provided are libraries of immunoglobulins and immunoglobulin expressing cells as well as methods and vector constructs for preparation of these libraries. Immunoglobulins provided herein are useful inter alia as immunological and diagnostic agents and as therapeutic molecules in the treatment of diseases such as autoimmune diseases, heart disease, infections and cancers.

### CROSS-REFERENCE TO RELATED APPLICATIONS

[0001] This application claims priority to U.S. Provisional Patent Application No. 60/415,024, filed Sep. 30, 2002.

### REFERENCE TO SEQUENCE LISTING SUBMITTED ON COMPACT DISC

[0002] This application incorporates by reference in its entirety the Sequence Listing contained in the accompanying two compact discs, one of which is a duplicate copy. Each CD contains the following file: 1001U SEQLIST.txt, having a date of creation of Sep. 26, 2003 and constituting 1.64 MB (361 pages).

### BACKGROUND OF THE INVENTION

[0003] 1. Technical Field of the Invention

[0004] The present invention relates generally to the fields of immunology and molecular biology. More specifically, this invention relates to methods for the preparation of immunoglobulins, including fully-human immunoglobulins, and to immunoglobulins and compositions comprising immunoglobulins prepared by the methods of the present invention. This invention also relates to libraries of immunoglobulins and immunoglobulin expressing cells as well as to methods and vector constructs for the preparation of these libraries. Immunoglobulins presented herein are useful, inter alia, as immunological and diagnostic agents and as therapeutic molecules in the treatment of diseases such as autoimmune diseases, heart disease, infections, and cancers.

[0005] 2. Description of the Related Art

[0006] Conventional methodologies for the production of monoclonal antibodies (mAbs) generally involve the repeated immunization of rodents (usually mice) with an antigen of interest, isolation of antibody-producing B cells from killed immunized animals, and immortalization of the antibody-producing B cells by fusion with myeloma cells to generate B cell “hybridomas.” Libraries of hybridoma cells are screened for antigen-binding specificity and suitable clones purified and propagated.

[0007] As the fusion process is inefficient, potentially useful clones are frequently lost. More importantly, in terms of their potential clinical use, rodent derived mAbs are often antigenic when administered to humans. Consequently, a major limitation in the clinical use of rodent mAbs is the anti-globulin response. Miller et al. Blood 62:988-995, (1983); and Schroffet al. Cancer Res. 45:879-885 (1985).

[0008] Attempts to overcome this problem have been made by constructing chimeric antibodies in which an animal (non-human) antigen binding domain is coupled to a human constant domain. Morrison et al. Proc. Nat. Acad. Sci. USA 81:6851-6855 (1984); Boulianne et al. Nature 312:643-646 (1984); and Neuberger et al. Nature 314:268-270 (1985). Typically, chimeric antibodies contain approximately 33% non-human (normally rodent) protein and, therefore, are capable of eliciting a significant anti-globulin response in humans. For example, much of the anti-globulin response to mAb OKT3 is directed against the variable region of the molecule. Jaffers et al. Transplantation 41:572-578 (1986).

[0009] To further reduce the response to foreign protein, “humanized” mAbs have been produced. Jones et al., Nature 321:522-525 (1986); Reichmann et al., Nature 332:323-327 (1988); and Verhoeyen et al., Science 239:1534-1536 (1988). These mAbs are approximately 90-95% human with only the complementarity determining regions (CDRs) being non-human. Humanized mAbs produced in rodent cells are less immunogenic than chimeric mAbs. They still, however, can elicit an anti-globulin response in patients. Bell et al., Lancet 355:858-859 (2000). Fully-human antibodies are currently being generated through phage display and transgenic mouse methodologies. DNA fragments encoding antibody scFv fragments identified by phage display technology must be combined through recombinant techniques to generate complete “human” antibodies. To generate antibodies from transgenic mice, hybridomas must be prepared and screened as for conventional monoclonal antibody methodology.

[0010] Accordingly, there remains a need in the art for improved methods for the preparation of immunoglobulins that overcome these deficiencies in existing methodologies for the preparation of immunoglobulins, including fully-human immunoglobulins.

### SUMMARY OF THE INVENTION

[0011] The present invention addresses these and other related needs by providing, inter alia, methods for generating immunoglobulins including immunoglobulin heavy and/or light chains and fragments thereof. Also provided are methods for generating libraries of cells that produce arrays of immunoglobulins, and methods for identifying cells expressing immunoglobulins having desired antigen specificity. Further provided are immunoglobulins, including immunoglobulin heavy and/or light chains and fragments thereof, cell lines and libraries generated by the methods of the present invention. Still further provided are vector systems that encode various regions of immunoglobulins and vector systems encoding, various rearrangement-facilitating proteins.

[0012] Thus, provided herein are methods for generating immunoglobulin heavy and/or light chains, the methods comprising the steps of: (1) reverting a V(D)J rearranged immunoglobulin gene in a cell by introducing into the cell a polynucleotide encoding V, D, and/or J regions of an immunoglobulin heavy and/or light chain, or fragment thereof, wherein the V, D, and/or J regions replace the V(D)J rearranged immunoglobulin gene such that the introduced V, D, and/or J regions are in a pro-B cell-like or a germline-like state; and (2) expressing in the V, D, and/or J region reverted cell a polynucleotide sequence encoding a recombination-facilitating protein, or functional fragment, derivative or variant thereof, for a time and under conditions sufficient to induce rearrangement of the V, D, and/or J regions, wherein rearrangement of the V, D, and/or J regions facilitates expression of an immunoglobulin heavy and/or light chain.

[0013] Certain related embodiments provide methods for generating immunoglobulin heavy chains, the methods comprising the steps of: (1) reverting a V(D)J rearranged immunoglobulin gene in a cell by introducing into the cell a polynucleotide encoding fused DJ regions of an immunoglobulin heavy chain, wherein the DJ regions replace the V(D)J rearranged immunoglobulin gene such that the introduced fused DJ regions are in a pro-B cell-like state; and (2) expressing in the reverted cell a polynucleotide sequence encoding a recombination-facilitating protein, or functional fragment thereof, for a time and under conditions sufficient to induce rearrangement of the germline V regions in the reverted cell with the introduced fused DJ regions, wherein rearrangement of the V and fused DJ regions facilitates expression of an immunoglobulin heavy chain.

[0014] Other related embodiments provide methods for generating immunoglobulin light chains, the methods comprising the steps of: (1) reverting a V(D)J rearranged immunoglobulin gene in a cell by introducing into the cell a polynucleotide encoding J regions of an immunoglobulin light chain, wherein the J regions replace the V(D)J rearranged immunoglobulin gene such that the introduced J regions are in a pro-B cell-like or a germline-like state; and (2) expressing in the reverted cell a polynucleotide sequence encoding a recombination-facilitating protein, or functional fragment thereof, for a time and under conditions sufficient to induce rearrangement of the germline V regions in the reverted cell with the introduced J regions, wherein rearrangement of the V and J regions facilitates expression of an immunoglobulin light chain.

[0015] Within other aspects of the present invention are provided methods for generating libraries of cells that produce an array of immunoglobulins wherein each immunoglobulin exhibits a particular antigen specificity. Exemplary methods comprise the steps of: (1) providing a cell having a V(D)J rearranged immunoglobulin heavy and/or light chain gene; (2) introducing into the cell a polynucleotide encoding V, D, and/or J regions of an immunoglobulin heavy and/or light chain, or fragment thereof, wherein said V, D, and/or J regions replace said V(D)J rearranged immunoglobulin gene such that the introduced V, D, and/or J regions are in a pro-B cell-like or a germline-like state; (3) culturing the cell under suitable conditions to generate a population of cells each member of which population comprises V, D, and/or J regions in a pro-B cell-like or a germline-like state; (4) introducing into cells of the reverted cell population a polynucleotide sequence encoding a recombination-facilitating protein, or functional fragment, derivative or variant thereof; and (5) culturing the resulting population of cells expressing the recombination-facilitating protein for a time and under conditions sufficient to induce rearrangement of the pro-B cell-like or germline-like V, D, and/or J regions, wherein rearrangement of the V, D, and/or J regions facilitates expression of an immunoglobulin heavy and/or light chain having a particular antigen specificity.

[0016] Other aspects provide methods for identifying in a cell an immunoglobulin having a desired antigen specificity, the methods comprising the steps of: (1) reverting a V(D)J rearranged immunoglobulin gene in a cell by introducing into the cell a polynucleotide encoding V, D, and/or J regions of an immunoglobulin heavy and/or light chain, or fragment thereof, wherein the V, D, and/or J regions replace the V(D)J rearranged immunoglobulin gene such that the introduced V, D, and/or J regions are in a pro-B cell-like or a germline-like state; (2) expressing in the reverted cell a polynucleotide sequence encoding a recombination-facilitating protein, or functional fragment, derivative, or variant thereof, for a time and under conditions sufficient to induce rearrangement of the pro-B cell-like or germline-like V, D, and/or J regions, wherein rearrangement of the V, D, and/or J regions facilitates expression of an immunoglobulin heavy and/or light chain; and (3) screening the resulting V, D, and/or J region rearranged cells for an immunoglobulin having the desired antigen specificity.

[0017] Within other related aspects, the present invention provides methods for generating cell lines capable of producing immunoglobulins having a desired specificity, the methods comprising the step of reverting a V(D)J rearranged immunoglobulin gene in a cell by introducing into the cell a polynucleotide encoding V, D, and/or J regions of an immunoglobulin heavy and/or light chain, or fragment thereof, wherein the V, D, and/or J regions replace the V(D)J rearranged immunoglobulin gene such that the introduced V, D, and/or J regions are in a pro-B cell-like or a germline-like state.

[0018] Still further related aspects provide methods for generating cell lines capable of producing immunoglobulins having a desired specificity, the methods comprising the step of reverting a V(D)J rearranged immunoglobulin gene in a cell by introducing into the cell a polynucleotide encoding one or more fused DJ regions of an immunoglobulin heavy chain, wherein the DJ regions replace the V(D)J rearranged immunoglobulin gene such that the introduced fused DJ regions are in a pro-B cell-like state. Within certain methods, the introduced polynucleotide comprises two or more fused DJ regions. Alternative methods provide that the polynucleotide comprises at least three, four, or five fused DJ regions. Still further methods provide that the polynucleotide comprises six fused DJ regions. An exemplary polynucleotide comprising six fused DJ regions is presented herein in FIG. 1.

[0019] Other aspects of the present invention provide methods for producing immunoglobulins having a particular affinity or specificity for a target molecule, the methods comprising the steps of: (1) generating a reverted lymphoma cell line capable of producing immunoglobulins; (2) expressing a polynucleotide encoding a recombination-facilitating protein, or functional fragment, derivative, or variant thereof, in the reverted lymphoma cell line for a time and under conditions sufficient to induce a rearrangement of the genes encoding the immunoglobulins which facilitates the generation of a library of lymphoma cells which produce an array of immunoglobulins wherein each immunoglobulin exhibits a particular affinity or specificity; and (3) screening for immunoglobulins having a desired affinity or specificity.

[0020] Within other aspects of the present invention are provided methods for producing libraries of human monoclonal antibody-producing lymphoma cells, the methods comprising the step of expressing in a reverted human lymphoma cell a polynucleotide encoding a recombination-facilitating protein for a time and under conditions sufficient to induce rearrangement of genes encoding human antibodies in the reverted lymphoma cells.

[0021] In other aspects, the present invention provides methods for generating a library of lymphoma cell lines of human origin, each human lymphoma cell line capable of producing filly-human immunoglobulins of a particular specificity, the method comprising the steps of: (1) reverting a V(D)J rearranged immunoglobulin gene in a human lymphoma cell line by introducing a polynucleotide encoding human V, D, and/or J regions of human immunoglobulin heavy and/or light chains into the human lymphoma cell line wherein the V, D, and/or J regions replace the V(D)J rearranged immunoglobulin gene, wherein the V, D, and/or J regions replace said V(D)J rearranged immunoglobulin gene such that the introduced V, D, and/or J regions are in a pro-B cell-like or germline-like state; (2) expressing in the reverted human lymphoma cell a polynucleotide sequence encoding a human recombination-facilitating protein, or a functional fragment, derivative or variant thereof, for a time and under conditions sufficient to facilitate rearrangement of immunoglobulin-encoding genes thus generating a library of human lymphoma cells each producing a filly-human immunoglobulin of a particular specificity.

[0022] In certain related aspects, the present invention provides methods for generating a library of lymphoma cell lines of human origin, each human lymphoma cell line capable of producing fully-human immunoglobulin heavy chains of a particular specificity, the method comprising the steps of: (1) reverting a V(D)J rearranged immunoglobulin gene in a human lymphoma cell line by introducing a polynucleotide encoding fused DJ regions of a human immunoglobulin heavy chain into the cell line, wherein the DJ regions replace the V(D)J rearranged immunoglobulin gene such that the introduced fused DJ regions are in a pro-B cell-like state; (2) expressing in the reverted human cell a polynucleotide sequence encoding a human recombination-facilitating protein, or functional fragment, derivative or variant thereof, for a time and under conditions sufficient to induce rearrangement of the human lymphoma cell line germline V regions with the introduced fused DJ regions, wherein rearrangement of the V and fused DJ regions facilitates expression of a fully-human immunoglobulin heavy chain. An exemplary polynucleotide encoding fused DJ regions is presented herein in FIG. 1.

[0023] Still further related aspects provide methods for generating a library of lymphoma cell lines of human origin, each human lymphoma cell line capable of producing fully-human immunoglobulin light chains of a particular specificity, the method comprising the steps of: (1) reverting a V(D)J rearranged immunoglobulin gene in a human lymphoma cell by introducing a polynucleotide encoding J regions of a human immunoglobulin light chain into the human lymphoma cell line, wherein the J regions replace the V(D)J rearranged immunoglobulin gene such that the introduced J regions are in a pro-B cell-like or a germline-like state; (2) expressing in the reverted human lymphoma cell line a polynucleotide sequence encoding a human recombination-facilitating protein, or functional fragment, derivative or variant thereof, for a time and under conditions sufficient to induce rearrangement of the germline V regions with the introduced J regions, wherein rearrangement of the V and J regions facilitates expression of a fully-human immunoglobulin light chain.

[0024] In those embodiments of the present invention wherein cells containing V(D)J rearranged immunoglobulin genes are reverted to a pro-B cell-like state, reversion is achieved by introducing a vector, such as a plasmid vector, comprising a polynucleotide encoding fused DJ regions of an immunoglobulin heavy chain, or fragment thereof. Alternatively, cells containing V(D)J rearranged immunoglobulin genes may be reverted to a germline-like state by introducing a vector comprising a polynucleotide encoding V, D, and/or J regions of immunoglobulin heavy and/or light chains, or fragments thereof, wherein the V, D, and/or J regions are assembled in the vector in a germline-like state.

[0025] Thus, the present invention provides vectors, including plasmid vectors, useful in reverting cell lines to a pro-B cell-like state or to a germline-like state, the vectors comprising one or more immunoglobulin regions including V regions, D regions, and/or J regions as well as any combination thereof. More preferred vectors comprise D and/or J regions. Still more preferred are vectors for reverting cell lines to a pro-B cell-like state wherein such vectors comprise fused DJ regions that approximate a rearranged form.

[0026] Vectors of the present invention further comprise a 5′ flanking region and a 3′ flanking region for facilitating homologous recombination of the antibody regions into a cell having a rearranged immunoglobulin gene. Generally, the 5′ flanking region (a) comprises a promoter region, such as a VH promoter region, and (2) is operably linked 5′ to the 5′-most fused DJ region, and the 3′ flanking region is operably linked 3′ to the 3′-most fused DJ region. Optionally, the vector may further comprise a selectable marker gene 5′ to the 5′-most fused DJ region and 3′ to the 5′ flanking region. Within certain embodiments, expression of the selectable marker is regulated by a promoter, such as the VH promoter, contained within the 5′ flanking region.

[0027] Each of the vectors disclosed herein facilitate replacement of the endogenous V(D)J rearrangement by introducing V, D, and/or J regions by homologous recombination. An exemplary plasmid vector for introducing fused DJ regions by homologous recombination is presented herein in FIG. 1.

[0028] In those embodiments of the present invention wherein cells containing V(D)J rearranged immunoglobulin genes are reverted to a germline-like state, reversion may be achieved by introducing a chromosome, or substantial portion thereof, comprising a sequence encoding V, D, and/or J regions of an immunoglobulin heavy and/or light chain, or fragment thereof wherein the chromosome encodes a complete germline heavy or light chain antibody repertoire or substantial portion thereof. Preferred chromosomes include human chromosomes 2, 14, and 22. In the most preferred embodiments, the introduced chromosome replaces the portion of the chromosome that corresponds to V(D)J rearrangements in chromosome 2, 14, and/or 22, respectively.

[0029] Chromosomes may be introduced into a cell by a methodology including, but not limited to, microcell-mediated chromosome transfer, T cell-fusion, micro-injection, and/or yeast protoplast fusion. Within certain aspects, cells containing V(D)J rearranged immunoglobulin genes are reverted to a germline-like configuration by fusing a B cell line with precursor B cells isolated from human bone marrow or cord blood. Other aspects provide that cells may be reverted to a germline-like configuration by fusing a B cell line with T cells isolated from human blood. Still further aspects provide that cells are reverted to a germline-like configuration by fusing B cell lines with rodent/human somatic cell hybrids carrying single human chromosomes.

[0030] Certain aspects of the present invention are directed to the generation of immunoglobulins of human origin. The presently disclosed methods may also be employed for the production of non-human immunoglobulins of primate, sheep, pig, cow, horse, donkey, poultry, rabbit, mouse, rat, guinea pig, hamster, dog, and cat origin.

[0031] Recombination-facilitating proteins, or functional fragments, derivatives or variants thereof, that are suitable in any of the methods disclosed herein may be selected from the group consisting of RAG-1 and RAG-2. RAG-1 and RAG-2 proteins may be from any species including primates, livestock animals, laboratory test animals and companion animals as well as functionally similar molecules from avian, reptilian, amphibian or aquatic animals. More preferred are RAG-1 and RAG-2 proteins from humans such as those provided herein as SEQ ID NOs: 2 and 4.

[0032] Recombination-facilitating proteins, or functional fragments, derivatives or variants thereof, may be expressed transiently for a time and under conditions sufficient to achieve recombination in any of the reverted cells recited herein. Within other embodiments, the recombination-facilitating proteins may be expressed constitutively and expression of these proteins may be under the control of an inducible transcriptional promoter.

[0033] Preferred cells to be employed in the methods of the present invention include any immunoglobulin-producing cell line such as, for example, lymphocytes and lymphocyte cell lines such as B lymphocytes, B lymphocyte cell lines, B cell lymphoma cells, and B cell lymphoma cell lines. More preferred are human lymphoma cell lines including, but not limited to, human B cell lines generated from patients with Burkitt's lymphoma. Most preferred cell lines are Ramos, Ramos sub-line 2G6, Burkitt's lymphoma cell lines BL2 and BL16 and BL16 sub-line CL-01.

[0034] Other embodiments of the present invention provide immunoglobulins and fragments thereof, including, but not limited to Fab, F(ab′)₂, Fc, scFv that are generated by any of the methods disclosed herein.

[0035] Further aspects of the present invention provide that cells expressing immunoglobulins and fragments thereof, generated by any of the methods presented herein may be further treated with an agonist, or combination of agonists, to induce switching from a first antibody isotype to a second antibody isotype. Within these aspects, the first antibody isotype may be selected from the group consisting of IgM, IgD, IgG1, IgG2, IgG3, IgG4, IgE, IgA1 and IgA2; the second antibody isotype may be selected from the group consisting of IgD, IgG1, IgG2, IgG3, IgG4, IgE, IgA1 and IgA2.

[0036] Suitable agonists include, but are not limited to, (1) ligands for CD40 such as CD154, anti-CD40 or fresh T cells activated with, for instance, phytohaemoglutenin; (2) ligands for the B cell receptor such as anti-Ig or anti-Ig coupled to dextran; (3) B cell mitogens such as purified protein derivative from Mycobacterium species (PPD), or bacterial DNA, or synthetic oligonucleotides containing unmethylated CpG dinucleotides; (4) cytokines such as IL2, IL4, IL5, IL6, IL10, IL13, TGFβ or IFNγ; (5) anti-CD19; and/or (6) anti-CD21. Cells expressing immunoglobulins may be exposed to one or more of these agonists alone or in combination.

[0037] Within certain aspects, cells and/or libraries of cells expressing one or more immunoglobulin, or fragment(s) thereof, may be further subjected to mutagenesis to, for example, increase efficiency of antibody production and/or increase efficiency of binding to, and/or neutralizing, target molecules of interest. Exemplary methods for achieving mutagenesis comprise the step of introducing into the cell and/or library of cells a polynucleotide encoding activation-induced cytidine deaminase (AICD). Thus, certain methods comprise the step of introducing into the cell and/or library of cells a polynucleotide encoding human activation-induced cytidine deaminase (AICD) provided herein as SEQ ID NO: 38.

[0038] Further aspects of the present invention provide that the antigen specificity and/or affinity of immunoglobulins generated by any of the methods presented herein may be altered by introducing into the cells and/or libraries of cells a polynucleotide encoding Terminal Deoxynucleotidyltransferase (TdT) or a functional fragment, derivative or variant thereof. Most preferred is human TdT as disclosed herein in SEQ ID NO: 6. Preferably, the polynucleotide encoding TdT is introduced into the cells and/or library of cells coincident with the introduction of the polynucleotide(s) encoding the recombination-facilitating protein.

[0039] Still further embodiments of the present invention provide vectors for expressing recombination-promoting proteins and fragments, derivatives, and variants thereof Preferred vectors comprise one or more polynucleotide sequences encoding recombinant-promoting proteins including, but not limited to, RAG-1 and/or RAG-2. More preferred are vectors comprising one or more polynucleotide sequence encoding human RAG-1 and/or RAG-2 as disclosed herein in SEQ ID NOs: 1 and 3. Exemplary vectors are presented herein in FIGS. 2, 5B (pBI-TdT-GFP.RAG2, SEQ ID NO: 42), and SEQ ID NO: 40 (pcDNA3-RAG1) and are described in further detail within the Examples herein below.

[0040] These and other aspects of the present invention will become apparent upon reference to the following detailed description and attached drawings. All references disclosed herein are hereby incorporated by reference in their entirety as if each was incorporated individually.

### BRIEF DESCRIPTION OF THE DRAWINGS AND SEQUENCE IDENTIFIERS

[0041] FIG. 1 is a diagrammatic representation of an exemplary recombinant DNA construct useful for reverting, in a cell, rearranged immunoglobulin genes to a pro-B cell-like state. Each fragment of the construct was generated by PCR using the primers and DNA templates indicated. Fragments were ligated together after digestion of the PCR products with the restriction enzymes indicated.

[0042] FIG. 2 is a diagrammatic representation of an adenovirus vector for expressing Rag-2, useful for facilitating rearrangement of immunoglobulin regions that are in a pro-B cell like or a germline-like state.

[0043] FIGS. 3A through 3D depict the analysis of G418 plus hygromycin double-resistant RK1 and RK2 cell lines generated by microcell-mediated chromosome transfer (MMCT) from A9-Hytk14 cells and G418-resistant Ramos cells. FIG. 3A is a photograph of an agarose gel showing the detection of J_{H} elements normally absent from Ramos in double-resistant lines. DNA extracted from A9-Hytk14, Ramos, RK1.1, and RK1.2 cell lines was subjected to PCR using primer A (that can anneal to all six J_{H} elements, SEQ ID NO: 43) paired with one of primers B to G (specific for sequences downstream of each individual J_{H} element, SEQ ID NOs: 44-49, respectively). FIG. 3B is a graph of fluorescence activated cell sorting (FACS) data obtained from cells stained with anti-Igκ conjugated to FITC. FIG. 3C is a graph of FACS data obtained from cells stained for total (surface+intracellular) IgM expression by RK2.1/x and RK2.2/x lines (x=1 to 5) which were cloned by limiting dilution from surface Ig-depleted RK1.1 and RK1.2 cells, respectively. RK1.1 and RK1.2 cells depleted of surface Ig-positive cells (e.g., FIG. 3B) were cloned by limiting dilution. FIG. 3D is a photograph of an agarose gel showing the absence of the rearranged V(D)J_{H} gene segment in some surface Ig-depleted Ramos-glH sub-clones.

[0044] FIGS. 4A through 4C are immunoblots demonstrating the detection of RAG1 and TdT proteins. RAG1 protein was readily detectable in unmanipulated Ramos cells (FIG. 4A). TdT protein was not detectable in Ramos cells (FIG. 4B) until transduced with TdT-expressing plasmid (FIG. 4C) or adenovirus (data not shown).

[0045] FIGS. 5A through 5C present plasmid maps of pIRES-rtTA-puro (FIG. 5A, SEQ ID NO: 41) and pBI-TdT-GFP.RAG2 (FIG. 5B, SEQ ID NO: 42) (described in the Examples presented herein below) and a histogram of FACS data demonstrating doxycycline-regulated expression of GFP-RAG2 and TdT (FIG. 5C). Plasmids pIRES-rtTA-puro and pBI-TdT-GFP.RAG2 were linearized and co-transfected into RK2.1/4 cells and RK2.2/3 cells. Puromycin-resistant colonies were exposed to doxycycline for 7 days. Peak GFP-fluorescence was detected on day 4 as shown for the exemplary RK2.2/3 transfectant designated RK6.6. FIG. 5C.

[0046] FIG. 6 presents a histogram of, and table quantifying, FACS data of GFP expression in cells transiently infected with non-replicating recombinant GFP-adenovirus. Histograms show fluorescence due to GFP expression in Ramos cells, NIH 3T3 cells, RD1 cells—Ramos cells transfected with pCAR-IRES-neo, and Ramos cells previously sorted by FACS as a denovirus-susceptible. The timepoint of maximal GFP fluorescence is shown—day 3 for Ramos lines and day 1 for NIH 3T3 cells. The table indicates the relative frequencies of cells in infected cultures expressing GFP. In all cases fluorescence almost disappeared by day 5.

[0047] FIGS. 7A through 7D present FACS data obtained at various points during the purification of phOx antigen-specific cells from Ramos cultures. Flow cytometric analyses of the frequency of phOx antigen-specific cells present after each enrichment step are shown. FITC fluorescence indicates cells that bind BSA conjugated to both FITC and phOx. A culture of 10⁸ Ramos cells was seeded with 100 phOx-specific “transfectoma” (RCC64) cells to give a precursor frequency of 1 in 10⁶. FIG. 7A. Selection for phOx-binding cells using MACS beads led to a 600-fold enrichment for phOx-specific Ramos cells. FIGS. 7A and 7B. Further selection by 2-step flow cytometric sorting led to a total enrichment of 10⁶-fold to give a purity of 96%. FIGS. 7B through 7D.

[0048] SEQ ID NO: 1 is a cDNA sequence encoding the human RAG-1 protein sequence of SEQ ID NO: 2 (Genbank Accession No. NM_{—}000448).

[0049] SEQ ID NO: 2 is the human RAG-1 protein sequence encoded by the cDNA sequence of SEQ ID NO: 1 (Genbank Accession No. NP_{—}000439).

[0050] SEQ ID NO: 3 is a cDNA sequence encoding the human RAG-2 protein sequence of SEQ ID NO: 4 (Genbank Accession No. XM_{—}089839).

[0051] SEQ ID NO: 4 is the human RAG-2 protein sequence encoded by the cDNA sequence of SEQ ID NO: 3 (Genbank Accession No. XP_{—}089839).

[0052] SEQ ID NO: 5 is a cDNA sequence encoding the human Terminal Deoxynucleotidyltransferase (TdT) protein sequence of SEQ ID NO: 6 (Genbank Accession No. XM_{—}055459).

[0053] SEQ ID NO: 6 is the human Terminal Deoxynucleotidyltransferase (TdT) protein sequence encoded by the cDNA sequence of SEQ ID NO: 5 (Genbank Accession No. XP_{—}055459).

[0054] SEQ ID NO: 7 is an oligonucleotide primer sequence designated herein as 5′ VH4-34 (KpnI).

[0055] SEQ ID NO: 8 is an oligonucleotide primer sequence designated herein as 3′ VH4-34 (ApaI).

[0056] SEQ ID NO: 9 is an oligonucleotide primer sequence designated herein as 5′ JH63 'fl (NotI).

[0057] SEQ ID NO: 10 is an oligonucleotide primer sequence designated herein as 3′ JH63 'fl (SacII).

[0058] SEQ ID NO: 11 is an oligonucleotide primer sequence designated herein as 3′ SnaBI (VH4-34).

[0059] SEQ ID NO: 12 is an oligonucleotide primer sequence designated herein as 5′ SnaBI (VH4-34).

[0060] SEQ ID NO: 13 is an oligonucleotide primer sequence designated herein as 5′ Eco-gpt.

[0061] SEQ ID NO: 14 is an oligonucleotide primer sequence designated herein as 3′ Eco-gpt.

[0062] SEQ ID NO: 15 is an oligonucleotide primer sequence designated herein as 5′ D3-10.1.

[0063] SEQ ID NO: 16 is an oligonucleotide primer sequence designated herein as 3′ JH1.

[0064] SEQ ID NO: 17 is an oligonucleotide primer sequence designated herein as 5′ D3-10.2.

[0065] SEQ ID NO: 18 is an oligonucleotide primer sequence designated herein as 3′ JH2.

[0066] SEQ ID NO: 19 is an oligonucleotide primer sequence designated herein as 5′ D3-10.3.

[0067] SEQ ID NO: 20 is an oligonucleotide primer sequence designated herein as 3′ JH3.

[0068] SEQ ID NO: 21 is an oligonucleotide primer sequence designated herein as 5′ D3-10.4.

[0069] SEQ ID NO: 22 is an oligonucleotide primer sequence designated herein as 3′ JH4.

[0070] SEQ ID NO: 23 is an oligonucleotide primer sequence designated herein as 5′ D3-10.5.

[0071] SEQ ID NO: 24 is an oligonucleotide primer sequence designated herein as 3′ JH5.

[0072] SEQ ID NO: 25 is an oligonucleotide primer sequence designated herein as 5′ D3-10.6.

[0073] SEQ ID NO: 26 is an oligonucleotide primer sequence designated herein as 3′ JH6.

[0074] SEQ ID NO: 27 is the nucleotide sequence of the gpt gene in cloning vector pSV2 gpt (Genbank Accession No. M12907).

[0075] SEQ ID NO: 28 is the amino acid sequence of the Gpt protein (Genbank Accession No. AAA23932) encoded by the gpt gene in cloning vector pSV2.

[0076] SEQ ID NO: 29 is the nucleotide sequence for a human DNA for immunoglobulin alpha heavy chain (Genbank Accession No. X17116).

[0077] SEQ ID NO: 30 is the nucleotide sequence for Homo sapiens immunoglobulin heavy-chain variable region (Genbank Accession No. AB019437).

[0078] SEQ ID NO: 31 is the nucleotide sequence for Homo sapiens immunoglobulin heavy-chain variable region (Genbank Accession No. AB019438).

[0079] SEQ ID NO: 32 is the nucleotide sequence for Homo sapiens immunoglobulin heavy-chain variable region (Genbank Accession No. AB019439).

[0080] SEQ ID NO: 33 is the nucleotide sequence for Homo sapiens immunoglobulin heavy-chain variable region (Genbank Accession No. AB019440).

[0081] SEQ ID NO: 34 is the nucleotide sequence for Homo sapiens immunoglobulin heavy-chain variable region (Genbank Accession No. AB019441).

[0082] SEQ ID NO: 35 is the nucleotide sequence for Homo sapiens RhD blood group antigen cDNA (Genbank Accession No. L08429).

[0083] SEQ ID NO: 36 is the nucleotide sequence for an oligonucleotide primer useful in PCR amplifying cDNA encoding human Rag-2.

[0084] SEQ ID NO: 37 is the nucleotide sequence for an oligonucleotide primer useful in PCR amplifying cDNA encoding human Rag-2.

[0085] SEQ ID NO: 38 is a cDNA sequence encoding the human activation-induced cytidine deaminase protein depicted in SEQ ID NO: 40 (Celera transcript hCT16345).

[0086] SEQ ID NO: 39 is the human activation-induced cytidine deaminase protein sequence encoded by the cDNA sequence of SEQ ID NO: 39 (Celera protein hCP42155).

[0087] SEQ ID NO: 40 is nucleotide sequence of the plasmid CJ087: pCDNA3-RAG1.

[0088] SEQ ID NO: 41 is the nucleotide sequence of the plasmid pIRES-rtTA-puro.

[0089] SEQ ID NO: 42 is the nucleotide sequence of the plasmid pBI-TdT-GFP.RAG2.

[0090] SEQ ID NO: 43 is the nucleotide sequence of primer “A” (5′-GGT CAC CGT CTC YTC AGG T-3′).

[0091] SEQ ID NO: 44 is the sequence of oligonucleotide primer “B” (5′-GAT ATC GAT ACC AGT AGC ACA GCC TCT G-3′).

[0092] SEQ ID NO: 45 is the sequence of oligonucleotide primer “C” (5′-CTG GAA TTC TGC AGG ACA CTC GAA TGG-3′).

[0093] SEQ ID NO: 46 is the sequence of oligonucleotide primer “D” (5′-TGC GGA TCC ACC TGA CTC TCC GAC TGT CC-3′).

[0094] SEQ ID NO: 47 is the sequence of oligonucleotide primer “E” (5′-TA ACT AGT TGG GAC CCT CTC AGA CT-3′).

[0095] SEQ ID NO: 48 is the sequence of oligonucleotide primer “F” (5′-CA TCT AGA CAG AGA CCT TCT GTC TCC G-3′).

[0096] SEQ ID NO: 49 is the sequence of oligonucleotide primer “G” (5′-TGA GCG GGC CGC GGC CTC AAT TCC AGA CAC AT-3′).

[0097] SEQ ID NO: 50 is the sequence of oligonucleotide primer jo1209 (5′-ATG AAA CAC CTG TGG TTC TTC CTC C-3′).

[0098] SEQ ID NO: 51 is the sequence of oligonucleotide primer jo191 (5′-CGG GTA CCA ACC TGC AAT GCT CAG GA-3′).

[0099] SEQ ID NO: 52 is the nucleotide sequence of the plasmid pShuttle-RAG2.

[0100] SEQ ID NO: 53 is the nucleotide sequence of the plasmid pShuttle-GFP-RAG2.

[0101] SEQ ID NO: 54 is the nucleotide sequence of the plasmid pAdEasy-RAG2.

[0102] SEQ ID NO: 55 is the nucleotide sequence of the plasmid pAdEasy.1-GFP-RAG2.

[0103] SEQ ID NO: 56 is the nucleotide sequence of the plasmid pAdEasy.2-GFP-RAG2.

[0104] SEQ ID NO: 57 is the sequence of oligonucleotide primer “Jo1266” (5′-GAC TCT AGA GCA GCT CCA AAG ATG GCA TGC G-3′).

[0105] SEQ ID NO: 58 is the sequence of oligonucleotide primer “Jo1267” (5′-GTT TGA ATT CCA CCT TGG TCC CTT GG-3′).

[0106] SEQ ID NO: 59 is the sequence of oligonucleotide primer “kam8” (5′-CCT GCT CTG GAG ATA AAT TGG G-3′).

[0107] SEQ ID NO: 60 is the sequence of oligonucleotide primer “kam9” (5′-CTG CTG TCC CAC GCC TGA CA-3′).

[0108] SEQ ID NO: 61 is the sequence of oligonucleotide primer “Jo1272” (5′-CCA TCG ATG CCT ACC TGC AGC CGC CGC CC-3′).

[0109] SEQ ID NO: 62 is the sequence of oligonucleotide primer “Jo1273” (5′-CGG GAT CCG AGG CTC TAT ACT ATA GAC-3′).

[0110] SEQ ID NO: 63 is the sequence of the plasmid pCAR-IRES-neo (pCJ124).

[0111] SEQ ID NO: 64 is the sequence of the plasmid pCAR-IRES-puro (pCJ126).

[0112] SEQ ID NO: 65 is the sequence of oligonucleotide primer “Jo1289” (5′-GG ATA TCG CTG CCC CCA AGT GTA ACT C-3′).

[0113] SEQ ID NO: 66 is the sequence of oligonucleotide primer “Jo1290” (5′-TAA AGC GGC CGC TTA CTT ATC GTC GTC ATC CTT GTA ATC AGG ATC CAT TGG TTC AAC TGT CTC-3′).

[0114] SEQ ID NO: 67 is the sequence of the plasmid pBlimp 1-IRES-bleo.

[0115] SEQ ID NO: 68 is the sequence of the plasmid pro-B IgH (PH017).

### DETAILED DESCRIPTION OF THE INVENTION

[0116] As indicated above, the present invention is directed to methods for the preparation of immunoglobulins, including fully-human immunoglobulins, and to immunoglobulins and compositions comprising immunoglobulins prepared by the methods of the present invention. Also provided herein are libraries of immunoglobulins and immunoglobulin expressing cells as well as methods and vector constructs for the preparation of these libraries. Immunoglobulins presented herein are useful, inter alia, as immunological and diagnostic agents and as therapeutic molecules in the treatment of diseases such as autoimmune diseases, heart disease, infections, and cancers.

[0117] As used in this specification and the appended claims, the singular forms “a,” “an” and “the” include plural references unless the content clearly dictates otherwise. The practice of the present invention will employ, unless indicated specifically to the contrary, conventional methods of virology, immunology, microbiology, molecular biology and recombinant DNA techniques within the skill of the art, many of which are described below for the purpose of illustration. Such techniques are explained fully in the literature. See, e.g., Sambrook, et al., “Molecular Cloning: A Laboratory Manual” (2nd Edition, 1989); Maniatis et al., “Molecular Cloning: A Laboratory Manual” (1982); “DNA Cloning: A Practical Approach, vol. I & II” (D. Glover, ed.); “Oligonucleotide Synthesis” (N. Gait, ed., 1984); “Nucleic Acid Hybridization” (B. Hames & S. Higgins, eds., 1985); “Transcription and Translation” (B. Hames & S. Higgins, eds., 1984); “Animal Cell Culture” (R. Freshney, ed., 1986); Perbal, “A Practical Guide to Molecular Cloning” (1984); Ausubel, et al. “Current protocols in Molecular Biology” (New York, John Wiley and Sons, 1987); Bonifacino, et al. “Current Protocols in Cell Biology” (New York, John Wiley & Sons, 1999); and Coligan, eta L. “Current Protocols in Immunology” (New York, John Wiley & Sons, 1999).

[0118] All publications, patents and patent applications cited herein, whether supra or infra, are hereby incorporated by reference in their entirety.

[0119] Reference herein to an “immunoglobulin” includes and is most preferably an immunoglobulin such as an antibody or biological or functional equivalent thereof. Reference herein to an “antibody” or the more generic term “immunoglobulin” includes reference to parts, fragments, precursor forms, derivatives, variants, and genetically engineered or naturally mutated forms thereof and includes amino acid substitutions and labeling with chemicals and/or radioisotopes and the like, so long as the resulting derivative and/or variant retains at least a substantial amount of antigen binding specificity and/or affinity.

[0120] Preferred mammalian immunoglobulins are human immunoglobulins such as human antibodies or, more particularly, human monoclonal antibodies. As used herein, the term “immunoglobulin” broadly includes both immunoglobulin heavy and light chains as well as all isotypes of antibodies, including IgM, IgD, IgG1, IgG2, IgG3, IgG4, IgE, IgA1 and IgA2, and also encompasses antigen binding fragments thereof, including, but not limited to, Fab, F(ab′)₂, Fc, and scFv.

[0121] The present invention is based on the finding that cells, including immunoglobulin expressing cells, that have recombined their immunoglobulin regions through the process of V(D)J joining, may be reverted to a pro-B cell-like and/or a germline-like state by introducing into the cell polynucleotides encoding one or more V, D, and/or J regions. As detailed herein, recombination of the immunoglobulin regions within the pro-B cell-like and/or germline-like reverted cell may be achieved by introducing into the cell a polynucleotide encoding one or more recombination facilitating protein such as, for example, RAG-1 and/or RAG-2. The affinity and/or specificity of immunoglobulins generated by the present methods may by altered by one or more mutagenesis steps such as introducing Terminal Deoxynucleotidyltransferase (TdT) into the cell, preferably simultaneous to introduction of a recombination-facilitating protein, or by constitutive or induced expressed of Activation-Induced Cytidine Deaminase (AICD).

[0122] As used herein, the term “pro-B cell-like” includes cells mimicking an early B cell lineage wherein rearrangement of D_{H} and J_{H} regions has already occurred. As described in greater detail and exemplified herein, a “pro-B cell-like” state may be achieved by introducing into a B- or plasma-cell and/or cell-line (e,g., Ramos) one or more fused DJ_{H} regions that mimic the in vivo DJ recombination event that occurs in the early pro-B cell stage, wherein the DJ_{H} regions replace the endogenous V(D)J_{H} rearranged immunoglobulin regions by homologous recombination.

[0123] Throughout the specification, the abbreviated designations V_{H}, D_{H}, and J_{H} are used interchangeably with the phrase heavy chain V, D, and J regions. Similarly, the abbreviated designations Vκ, Jκ, Vκ, and Jλ are used interchangeably with the phrases kappa light chain V and J regions and lambda light chain V and J regions, respectively. Also, the term “regions” has a meaning equivalent to the phrase “gene segment” when used in the context of V, D and/or J “regions” and “gene segments.” The terms DJ, V(D)J, and the like refer to a fused and/or rearranged form of V, D, and/or J regions. The term “germline-like” refers to cells mimicking a stage in the B cell lineage preceding the “pro-B cell-like” stage wherein each of the immunoglobulin gene segments are separated one from the other as is the case in immunoglobulin expressing cells before any in vivo recombination events occur.

[0124] As described and exemplified herein, a “germline-like” state may be achieved by introducing into a reverted cell one or more V, D, and/or J regions in a separate, unfused arrangement. A germline-like state may, for example, be achieved by introducing into the cell a vector comprising one or more V, D, and/or J region in a separate, unfused arrangement. Alternatively, introducing into the cell a whole chromosome, or substantial portion thereof may achieve a germline-like state, wherein the chromosome encodes a complete repertoire of germline immunoglobulin heavy or light chain region gene segments or substantial portion thereof.

[0125] The methods of the present invention will be better understood through the detailed description of the following specific embodiments:

[0126] (a) selection and/or generation of immunoglobulin expressing cells and cell-lines including B cell-lines, such as Burkitt's lymphoma (BL) cell-lines, that undergo isotype switching and somatic mutation either constitutively or inducibly;

[0127] (b) engineering of immunoglobulin expressing cells to revert their rearranged immunoglobulin genes to approximate a pro-B cell-like or a germline-like state;

[0128] (c) generation of libraries of immunoglobulin expressing cells by rearranging the immunoglobulin V, D, and/or J regions within the reverted cell-line, in a random manner mimicking in vivo B cell development, by introducing a polynucleotide encoding one or more recombination-facilitating protein including polypeptide components of a V(D)J-recombinase;

[0129] (d) enrichment and/or isolation of cells expressing immunoglobulins having a desired antigen affinity and/or specificity;

[0130] (e) mutation of cells that express an immunoglobulin having affinity and/or specificity for a target antigen by utilizing the innate ability of some immunoglobulin expressing cells and cell-lines to undergo somatic mutation and/or by introduction of a polynucleotide that encodes a mutagenesis promoting protein such as, for example, Activation-induced Cytidine Deaminase (AICD) and/or Terminal Deoxynucleotidyltransferase (TdT); and

[0131] (f) induction of immunoglobulin isotype switching by exposing immunoglobulin expressing cells to one or more cytokine and/or mitogen known to induce isotype switching in immunoglobulin expressing cells such as, for example, human B cell lymphoma cells.

[0132] Each of these embodiments is described in greater detail herein below.

### Selection of Immunoglobulin Expressing Cells and Cell-lines for Generating Antibodies

[0133] As indicated above, the present invention provides methods for generating immunoglobulins, including immunoglobulin heavy and/or light chains, as well as methods for generating cells and libraries of cells that express immunoglobulins having a desired antigen specificity and/or affinity. Each of the methods disclosed herein utilize a cell or cell line that is capable of expressing immunoglobulin genes. Therefore, certain preferred cells to be employed in the methods of the present invention include any immunoglobulin-producing cell or cell line such as, for example, lymphocytes and lymphocyte cell lines such as B lymphocytes, B lymphocyte cell lines, B cell lymphoma cells, and B cell lymphoma cell lines. More preferred are human lymphoma cell lines including, but not limited to, human B cell lines generated from patients with Burkitt's lymphoma.

[0134] Exemplary suitable cell lines are Ramos, Ramos sub-line 2G6, Burkitt's lymphoma cell lines BL2 and BL16, and BL16 sub-line CL-01. Such cell lines constitutively express the gene encoding activation-induced cytidine deaminase (AICD), or can be induced to express AICD, and, thereby, somatically mutate immunoglobulin genes. Denepoux et al., Immunity 6(1):35-46 (1997) and Sale et al., Immunity 9(6):859-69 (1998). The Ramos sub-line (2G6) also undergoes immunoglobulin isotype switching. Lederman et al., J. Immunol. 152(5):2163-71 (1994), and a sub-line of the BL16 Burkitt's lymphoma called CL-01 has been shown to undergo very efficient immunoglobulin isotype switching and immunoglobulin somatic mutation. Cerutti et al., J. Immunol. 160(5):2145-57 (1998).

[0135] In addition to Ramos, BL16, and CL-01, the present invention may also employ alternative cell lines that are capable of expressing immunoglobulin genes and, optionally, that undergo isotype switching and/or somatic mutation. Thus, methods of the present invention may be suitably employed in any number of immunoglobulin expressing cells and cell lines that are available in the art or that may be generated through routine experimentation.

### Reversion of V(D)J Recombined Immunoglobulin Genes in Immunoglobulin Expressing Cells to Germline-Like or Pro-B Cell-Like States

[0136] Immunoglobulin expressing cells, including B cells and B cell lines, are characterized by stages in development defined by the sequential rearrangement and expression of heavy and light chain immunoglobulin genes. The earliest B-lineage cells are commonly referred to as pro-B cells and are derived from pluripotent hematopoietic stem cells wherein the immunoglobulin genes are in the germline state. Rearrangement of heavy chain immunoglobulin regions takes place in pro-B cells, D to J joining at the early pro-B cell stage is followed by V to D joining at the late pro-B cell stage.

[0137] As part of the present invention, it was determined that a cell, such as an immunoglobulin expressing cell, comprising a rearrangement of its VDJ IgH regions and/or VJ IgL regions can be reverted to a more germline-like or pro-B cell-like state by introducing into the cell a chromosome or polynucleotide comprising one or more V, D, and/or J regions. As used herein, the terms “revert” and “reversion” refer to the process whereby a cell having rearranged V, D, and/or J regions is converted to a germline-like or pro-B cell-like state.

[0138] In a cell that is reverted to a germline-like state, one or more of the cell's rearranged V(D)J regions are replaced with unrearranged V, D, and/or J regions. As discussed in further detail below, a cell may be reverted to a germline-like state by introducing one or more chromosome, or substantial portion thereof, containing unrearranged V, D, and/or J regions. In such a case, one or more endogenous VDJ IgH rearrangement and/or one or more VJ IgL rearrangement may be replaced by homologous recombination between the introduced chromosome's unrearranged V, D, and/or J sequences and sequences comprising one or more endogenous V(D)J rearrangement. Alternatively, one or more endogenous VDJ IgH rearrangement and/or one or more VJ IgL rearrangement may be replaced with unrearranged V, D, and/or J sequences by spontaneous loss of an endogenous chromosome containing a V(D)J rearrangement and retention of one or more introduced chromosome, or substantial portion thereof.

[0139] In a cell that is reverted to a pro-B cell-like state, one or more of the cell's rearranged VDJ IgH regions is replaced with one or more DJ rearrangements by homologous recombination between sequences of an introduced polynucleotide comprising the DJ rearrangements and one or more endogenous rearranged VDJ IgH regions. Alternatively, or additionally, a cell may be reverted to a pro-B cell-like state by replacing one or more of the cell's rearranged VJ IgL (i.e. Igκ and/or Igλ) regions with one or more unrearranged J regions by homologous recombination between sequences of an introduced polynucleotide comprising unrearranged J regions and one or more endogenous rearranged VJ IgL regions. Thus, within the context of a pro-B cell-like state, the term “reversion” encompasses replacement of one or more of a cell's rearranged IgH and/or IgL regions.

[0140] In those embodiments of the present invention wherein cells containing V(D)J rearranged immunoglobulin genes are reverted to a pro-B cell-like state (i.e. D and J regions joined in the immunoglobulin heavy chain locus, but otherwise all immunoglobulin V and J regions separate; Hardy et al., J. Exp. Med. 173:1213-1225 (1991)), reversion may be achieved by introducing a vector, such as a plasmid vector, comprising a polynucleotide encoding fused DJ regions of an immunoglobulin heavy chain, or fragment thereof. Within certain methods, the introduced polynucleotide comprises two or more fused DJ regions. Other methods provide that the polynucleotide comprises at least three, four, or five fused DJ regions. Still further methods provide that the polynucleotide comprises six fused DJ regions. An exemplary polynucleotide comprising six fused DJ regions (pro-B IgH; PH017) is presented herein in FIG. 1. The nucleotide sequences of pro-B IgH (PH017) is presented herein as SEQ ID NO: 68.

[0141] Alternatively, cells containing V(D)J rearranged immunoglobulin genes may be reverted to a germline-like state by either (1) introducing a vector comprising a polynucleotide encoding V, D, and/or J regions of immunoglobulin heavy and/or light chains, or fragments thereof, wherein the V, D, and/or J regions are assembled in the vector in a germline-like state or (2) introducing a polynucleotide encoding V, D, and/or J regions of an immunoglobulin heavy and/or light chain, or fragment thereof as a chromosome, or substantial portion thereof, that encodes a complete germline heavy or light chain antibody repertoire or substantial portion thereof. Regardless of the methodology chosen to achieve a germline-like state, the genetic modification of an immunoglobulin expressing cell or cell line results i n the replacement o f t he V (D)J-rearranged antibody genes with arrangements more closely resembling those seen in the germline (i.e. all V, D and J immunoglobulin heavy and light chain regions separate one from the other).

[0142] (a) Revertiniz Immunoglobulin Expressing Cells to a Pro-B Cell-Like State

[0143] Thus, the present invention provides vectors, including plasmid vectors, useful in reverting cell lines to a pro-B cell-like state or to a germline-like state, the vectors comprising one or more antibody regions including V regions, D regions, and/or J regions as well as any combination thereof. More preferred vectors comprise D and/or J regions. Still more preferred are vectors for reverting cell lines to a pro-B cell-like state wherein such vectors comprise fused DJ regions that approximate a rearranged form. Each of the vectors disclosed herein facilitate replacement of the endogenous V(D)J rearrangement by introducing V, D, and/or J regions by homologous recombination. An exemplary plasmid vector for introducing fused DJ_{H} regions by homologous recombination is presented herein in FIG. 1. The nucleotide sequences of pro-B IgH (PH017) is presented herein as SEQ ID NO: 68.

[0144] To achieve fused DJ_{H} regions, one or more of the 27 endogenous D_{H} regions may be joined to one or more of the 6 endogenous J_{H} regions. D_{H} and J_{H} regions that have already undergone D-J rearrangement in vivo may, for example, be PCR amplified from genomic DNA isolated from human peripheral blood lymphocytes, as exemplified herein. Alternatively, individual D and J regions may be PCR amplified independently and conventional recombinant DNA methodology utilized to create fused DJ regions. Vectors may be constructed by incorporating one or more DJ_{H} region operably linked to a selectable marker, such as, for example, the E. coli gpt (Eco-gpt) gene (disclosed herein in SEQ ID NO: 27), to permit selection of effective recombination into the genome of the immunoglobulin expressing cell, for example, by conferring upon the reverted cell resistance to mycophenolic acid in the presence of added xanthine and hypoxanthine.

[0145] Vectors of the present invention further comprise a 5′ flanking region and a 3′ flanking region for facilitating homologous recombination of the antibody regions into a cell having a rearranged immunoglobulin gene wherein the 5′ flanking region is operably linked 5′ to the 5′-most fused DJ region and wherein the 3′ flanking region is operably linked 3′ to the 3′-most fused region.

[0146] The precise sequence of the 5′ and 3′ flanking region will vary depending upon the immunoglobulin expressing cell utilized but, in all cases, are designed to enable the reversion of the immunoglobulin expressing cell from a V(D)J or a VJ recombined state. V(D)J and VJ rearrangements in immunoglobulin expressing cells may be cloned as inserts from genomic DNA libraries or by PCR amplification directly from genomic DNA and subjected to DNA sequencing methodology to determine the nucleotide sequences that flank the unique V(D)J or VJ rearrangements. 5′ flanking regions comprise genomic sequence that is 5′ to the endogenous V(D)J or VJ rearrangement and 3′ flanking regions comprise genomic sequence that is 3′ to the endogenous V(D)J or VJ rearrangement. Within certain embodiments, the combination of 5′ and 3′ flanking regions permits the homologous recombination of fused DJ_{H} regions 3′ to unrearranged endogenous V regions and 5′ to the intronic enhancer upstream of immunoglobulin light and/or heavy chain constant (C) region exons. It will be understood, however, that the precise sequence of the 5′ and 3′ flanking regions will depend upon the sequences flanking the endogenous V, D, and/or J regions. Flanking regions suitable for constructing the vectors disclosed herein are generally at least 250 bp, most commonly at least 500, 1,000, 2,000, 5,000, and/or 10,000 bp.

[0147] Successful reversion of immunoglobulin expressing cells may be selected for, as indicated above, by utilizing a selectable marker, such as, but not limited to the bacterial neoR and gpt genes or fragments or derivatives thereof. In the specific case of immunoglobulin expressing cells, such as Burkitt's lymphoma cells, that normally express immunoglobulins on their surface in the context of a B cell receptor complex, successful reversion of the immunolobulin genes to a pro-B cell-like state may be monitored by detecting the stable loss of expression of immunoglobulin on the surface of reverted cells using such standard cell biology techniques as fluorescence-activated cell sorting (FACS) analysis.

[0148] (b) Reverting Immunoglobulin Expressing Cells to a Germline-Like State

[0149] An alternative approach to introducing the antibody germline into an immunoglobulin expressing cell or cell line, such as, for example the Ramos B cell-line, is through the introduction of a chromosome, or substantial portion thereof, comprising a sequence encoding V, D, and/or J regions of an immunoglobulin heavy and/or light chain, or fragment thereof wherein the chromosome encodes a germline heavy or light chain antibody repertoire. As used herein, a “substantial portion” of a chromosome refers to a portion of a chromosome that comprises each of the essential elements of that chromosome. Thus, for example, a “substantial portion” of a chromosome will contain a centromere, two (2) telomeres, and one or more origins of replication. Generally, a “substantial portion” of a chromosome encompasses a linear, generally megabase long, DNA segment that stably replicates in a vertebrate cell independent of integration and/or joining onto an endogenous chromosome. As used herein within the context of a chromosome, the phrase “substantial portion” is meant to include engineered “mini chromosomes” and “artificial chromosomes” as these terms are understood by those of skill in the art.

[0150] An exemplary source of chromosomes that may be suitably introduced into immunoglobulin expressing cells according to the methods of the present invention include panels of mouse cell lines carrying a single intact human chromosome. Cuthbert et al., Cytogenetics & Cell Genetics 71(1):68-76 (1995); Ning et al., Cytogenetics & Cell Genetics 60(1):79-80 (1992) and Ning et al., Genomics 16(3):758-760 (1993). Each cell line in the Cuthbert panel (named Hytk-1 through to Hytk-22) carries a single human autosomal chromosome tagged with a synthetic fusion gene (Hytk) that confers resistance to the antibiotic hygromycin (via the hyg protein) and susceptibility to the antiviral ganciclovir (via the tk protein). Each cell line in the Ning panel carries a single human autosomal chromosome tagged with the neo^{R} gene that confers resistance to the antibiotic G418. The relevant lines are named A9+2 and A9+22. The human chromosomes in these panels are derived from fibroblasts, so the immunoglobulin genes on human chromosomes 2, 14 and 22 are in a completely unrearranged germline configuration.

[0151] Human chromosomes, such as human chromosome 14 carrying the entire immunoglobulin heavy chain locus from A9-Hytk14 cells, may be transferred to immunoglobulin expressing cells, including immunoglobulin-positive Burkitt's lymphoma cells, using microcell-mediated chromosome transfer (MMCT). Introduction of the polynucleotide encoding immunoglobulin heavy chain V, D, and J regions may be selected for by screening immunoglobulin expressing cells for clones that are positive for hygromycin resistance, i.e. that have acquired the Hytk gene. Clones that lose the Ramos canonical VDJ_{H}-rearrangement and keep the germline IgH gene segments introduced by MMCT may be subsequently selected by identifying cells that are stably surface immunoglobulin negative and also negative in a PCR-based screen that detects the Ramos canonical VDJ_{H}-rearrangement. Alternatively, clones that spontaneously undergo homologous recombination involving the introduced chromosome 14 and the endogenous chromosome 14 carrying the V(D)J_{H} rearrangement may be subsequently selected by identifying cells that are stably surface immunoglobulin negative and negative in a PCR-based screen that detects the Ramos canonical VDJ_{H}-rearrangement, and are also ganciclovir-resistant, (that is, possibly reverted by a recombination at the immunoglobulin heavy chain locus that has caused the loss of the Hytk gene).

[0152] This same methodology with minor variations may also be employed to introduce a chromosome, or substantial portion thereof, comprising a sequence encoding V and J regions of immunoglobulin light chains, or fragments thereof as chromosome 2 and 22, or a substantial portion thereof, that encode the complete germline kappa and lambda light chain antibody repertoires, respectively, or substantial portions thereof. “Ig germline” light chain chromosomes would be most simply introduced into IgH-reverted lymphoma cells by fusion between IgH-reverted lymphomas and microcells derived from A9+2 or A9+22, because the antibiotics G418 and hygromycin could be used together to select lymphomas that were both IgH- and IgL-germline reverted. Alternatively, “Ig germline” light chain chromosomes could be introduced into IgH-reverted lymphoma cells by fusion between ganciclovir-resistant IgH-reverted lymphomas and microcells derived from A9-Hytk2 or A9-Hytk22 cells, with repetition of the use of hygromycin selection.

[0153] The introduction of chromosomes, or substantial portions thereof, comprising sequences encoding V, D and/or J regions of immunoglobulin light chains, or fragments thereof has at least two advantages over the use of vectors to achieve a germline-like state in immunoglobulin expressing cells. First, the direct transfer of chromosomes obviates the construction of vectors. Second, the introduction of whole chromosomes means that the resulting cell lines have the potential for recombining the complete complement of immunoglobulin V, D and/or J regions thereby maximizing the potential diversity of immunoglobulin cell libraries produced by the methods of the present invention.

[0154] Chromosomes may be introduced into a cell by a methodology including, but not limited to, microcell-mediated chromosome transfer (MMCT), T cell-fusion, micro-injection, and/or yeast protoplast fusion. Within certain aspects, lymphoma cell lines containing V(D)J rearranged immunoglobulin genes are reverted to a germline-like configuration by fusing a B cell line with precursor B cells isolated from human bone marrow or cord blood. Other aspects provide that lymphoma cell lines may be reverted to a germline-like configuration by fusing a B cell line with T cells isolated from human blood. Still further aspects provide that lymphoma cell lines are reverted to a germline-like configuration by fusing B cell lines with rodent/human somatic cell hybrids carrying single or mutiple human chromosomes.

### Promoting Recombination of V, D, and/or J Regions by Introducing a Polynucleotide Encoding a Recombination-facilitating Protein

[0155] Recombination between V, D, and/or J regions in a reverted cell may be achieved by introducing into the reverted cell a polynucleotide encoding one or more “recombination-facilitating proteins,” such as the proteins RAG-1, RAG-2, and TdT that collectively constitute a “V(D)J recombinase.” In combination with housekeeping DNA repair pathways, the two RAG proteins are sufficient to carry out immunoglobulin V(D)J recombination in any cell while the TdT protein is required for the insertion of random “N” nucleotides into the V(D)J junctions. Oettinger et al., Science 248:1517-1523 (1990) and Komori et al., Science 261:1171-1175 (1993).

[0156] Recombination-facilitating proteins induce, inter alia, rearrangement of immunoglobulin-encoding genes, preferably in a random manner that mimics the development of B cells in the mammalian or more preferably human body. As a result, a library of immunoglobulin expressing cells is generated that, instead of making one unique immunoglobulin, produce an array of different immunoglobulins and more particularly an array of different human monoclonal immunoglobulins.

[0157] Accordingly, in a preferred embodiment, there is provided a method for producing a library of human immunoglobulin-producing cells, the method comprising expressing one or more polynucleotides encoding a recombination-facilitating protein for a time and under conditions sufficient to induce rearrangement of genes encoding immunoglobulins in said reverted lymphoma cells and screening for cells that produce immunoglobulins.

[0158] As used herein, the term “recombination-facilitating protein” refers to those proteins, including functional derivatives, fragments, portions, mutants, variants and mimetics thereof, that are effective in facilitating recombination between immunoglobulin V, D, and/or J regions. Recombination-facilitating proteins, or functional fragments, derivatives or variants thereof, which are suitable in any of the methods disclosed herein may be selected from the group consisting of RAG-1 and RAG-2. Derivatives of polynucleotides encoding recombination-facilitating proteins include, but are not limited to, insertions, deletions, and substitutions of nucleotides within the polynucleotide coding region. Nucleotide insertional derivatives include 5′ and/or 3′ terminal fusions as well as intrasequence insertions of single or multiple nucleotides.

[0159] RAG-1 and RAG-2 proteins may be from any species including primates, livestock animals, laboratory test animals and companion animals as well as functionally similar molecules from avian, reptilian, amphibian or aquatic animals. More preferred are RAG-1 and RAG-2 proteins from humans such as those provided herein as SEQ ID NOs: 2 and 4, respectively.

[0160] Recombination-facilitating proteins, or functional fragments, derivatives or variants thereof, may be expressed transiently for a time and under conditions sufficient to achieve recombination in any of the reverted cells recited herein. Within other embodiments, the recombination-facilitating proteins may be expressed constitutively and expression of these proteins may be under the control of an inducible transcriptional promoter. cDNAs encoding the human proteins RAG-1, RAG-2, and TdT are presented herein as SEQ ID NOs: 1, 3, and 5, respectively. These sequences may be cloned singularly or in tandem into a vector, such as a plasmid vector, that drives expression of the introduced cDNAs in immunoglobulin expressing cells, such as Burkitt's lymphoma cells. Vectors carrying cDNAs encoding RAG-1, RAG-2, and TdT, or functional fragments, derivatives, and variants thereof, may be co-introduced into the immunoglobulin gene-reverted cell or cell-lines.

[0161] As exemplified herein, vectors comprising polynucleotides encoding recombination-facilitating proteins are Adenoviral vectors such as pAdEasy-1 (Stratagene, La Jolla, Calif., USA) exemplified in FIG. 2, packaged into recombinant Adenoviral particles after electroporation into packaging cell lines such as HK293T, and finally introduced into reverted B cells by adenoviral transduction. Genes carried in Adenoviral vectors transduced into Burkitt's lymphomas should be expressed in greater than 10% of the cells in culture, more preferably, in greater than 20%, 30%, 50%, or 70% of the cells in culture for a period of hours to days. Most preferably, the Adenoviral vectors are expressed in greater than 90% of the cells in culture for a period of hours to days. The adenoviral DNA (and hence RAG-1, RAG-2 and/or TdT expression) is lost as the cells divide. Successful expression of a functional recombination-facilitating protein is indicated by the appearance of immunoglobulin-positive cells detected by FACS in the transduced populations (that were originally stably immunoglobulin-negative).

[0162] It will be appreciated that alternative vector systems may be employed in the methods of the present invention to achieve expression of one or more recombination-facilitating protein. Vectors, including alternative viral vectors and plasmid vectors, may be fashioned to express, for example, Rag-1 and/or Rag-2 or functional fragments, derivatives, and variants thereof. Such vectors may be constructed and introduced into cells by conventional molecular and cell biology methodologies that are readily available in the art and that may be performed through routine experimentation.

[0163] Immunoglobulin-positive cells may be purified using any methodology commonly available in the art including, but not limited to, magnetic beads conjugated to anti-immunoglobulins, preferably anti-human immunoglobulins.

[0164] Multiple introductions of vectors comprising recombination-facilitating protein coding regions may be carried out to ensure as much diversity as possible in the immunoglobulin V(D)J recombinations produced. Growing the surface immunoglobulin-positive cells in culture will expand these libraries. The resulting libraries can be frozen down for long-term storage in unexpanded and expanded forms.

### Screening for Antigen-Specific Immunoglobulins

[0165] Within certain embodiments, methods of the present invention may further provide a step of screening V, D, and/or J region rearranged cells for immunoglobulins having a desired antigen binding specificity and/or affinity. As used herein, the term “antigen” broadly encompasses all those substances, molecules, proteins, nucleic acids, lipids and/or carbohydrates to which an immunoglobulin specifically binds and/or interacts.

[0166] Immunoglobulins may be screened for preferred antigen binding specificity and/or affinity by any of the methodologies that are currently available in the art. F or example, conventional cell panning, Western blotting and ELISA procedures may be employed to accomplish the step of screening for immunoglobulins having a particular specificity. A wide range of suitable immunoassay techniques is available as can be seen by reference to U.S. Pat. Nos. 4,016,043, 4,424,279, and 4,018,653, each of which is incorporated herein by reference.

[0167] In one type of assay, an unlabelled anti-immunoglobulin is immobilized on a solid support and the immunoglobulin-containing sample to be tested is brought into contact with the immobilized anti-immunoglobulin. After a suitable period of time sufficient to allow formation of a first complex, a target antigen labeled with a reporter molecule capable of producing a detectable signal is then added and incubated, allowing time sufficient for the formation of a second complex of immobilized anti-immunoglobulin/immunoglobulin sample/test antigen. Uncomplexed material is washed away, and the presence of the antigen is determined by observation of a signal produced by the reporter molecule. The results may either be qualitative, by simple observation of the visible signal, or may be quantified by comparison with a control sample containing known amounts of antigen or antibody. Variations of this type of assay include a simultaneous assay, in which both sample and labeled antigen are added simultaneously to the bound antibody.

[0168] In a second type of assay, an antigen for which an immunoglobulin is sought is bound to a solid support. The binding processes are well known in the art and generally consist of cross-linking, covalently binding or physically adsorbing the antigen to the solid support. The polymer-antigen complex is washed in preparation for the test sample. An aliquot of the sample to be tested is then added to the solid phase complex and incubated for a period of time sufficient (e.g., 2-40 minutes or overnight if more convenient) and under suitable conditions (e.g., from about room temperature to about 38° C., such as 25° C.) to allow binding of immunoglobulin to the antigen. Following the incubation period, the solid support is washed and dried and incubated with an immunoglobulin to which a reporter molecule may be attached thereby permitting the detection of the binding of the second immunoglobulin to the test immunoglobulin complexed to the immobilized antigen.

[0169] Suitable solid supports include glass or a polymer, the most commonly used polymers being cellulose, polyacrylamide, nylon, polystyrene, polyvinyl chloride or polypropylene. The solid supports may be in the form of tubes, beads, discs of microplates, or any other surface suitable for conducting an immunoassay.

[0170] An alternative assay system involves immobilizing the target immunoglobulin and exposing the immobilized target immunoglobulin to an antigen that may or may not be labeled with a reporter molecule. As used herein, the term “reporter molecule” refers to a molecule that, by its chemical, biochemical, and/or physical nature, provides an analytically identifiable signal that allows the screening for immunoglobulins complexed with antigens or with second immunoglobulins. Detection may be either qualitative or quantitative. The most commonly used reporter molecules employed in assays of the type disclose herein are enzymes, fluorophores, radioisotopes, and/or chemiluminescent molecules. In one particularly useful assay system, cultures of cell libraries expressing immunoglobulins in the context of B cell receptors, on the surface of the cells, may be incubated with antigen coupled to a label, such as biotin, or carrying a recombinant epitope, such as the FLAG epitope. Castrucci et al. J. Virol. 66:4647-4653 (1992). After a suitable incubation time, the labeled antigen is washed away by pelleting the cells two or three times from suspension in ice-cold medium.

[0171] The cells may be further incubated in medium containing a suspension of beads conjugated to a reagent that will specifically bind the label attached to the antigen (e.g., streptavidin or avidin for the biotin label, or anti-FLAG antibody for the FLAG epitope). Cells that bind to the beads as an indirect consequence of binding the antigen of interest are separated from the remaining cells by appropriate means, and then returned to tissue culture to proliferate. Repetition of this process using increasingly limiting amounts of antigen results in enrichment for cells that bind to the antigen specifically and/or with high affinity. Cells that bind directly to the beads independently of prior binding to antigen may be removed by incubation with beads in the absence of antigen. Individual antigen-binding clones may then be purified, such as for example by fluorescence-activated cell sorting (FACS), after labeling the cells with antigen conjugated directly or indirectly to a suitable fluorochrome such as fluorescein.

[0172] In the case of an enzyme immunoassay (EIA), an enzyme is conjugated to the detection immunoglobulin, generally by means of glutaraldehyde or periodate. As will be readily recognized, however, a wide variety of different conjugation techniques exist, which are readily available to the skilled artisan. Commonly used enzymes include horseradish peroxidase, glucose oxidase, P-galactosidase and alkaline phosphatase. In general, the enzyme-labeled immunoglobulin is added to a potential complex between an antigen and an immunoglobulin, allowed to bind, and then washed to remove the excess reagent. A solution containing the appropriate substrate is then added to the complex of antigen/test-immunoglobulin/labeled-immunoglobulin. The substrate reacts with the enzyme linked to the second antibody, giving a qualitative visual signal, which may be further quantified, usually spectrophotometrically, to indicate the amount of immunoglobulin present in the sample.

[0173] Alternatively, fluorescent compounds, such as fluorescein and rhodamine, or fluorescent proteins such as phycoerythrin, may be chemically coupled to immunoglobulins without altering their binding capacity. When activated by illumination with light of a particular wavelength, the fluorochrome-labeled immunoglobulin absorbs the light energy, inducing a state of excitability in the molecule, followed by emission of the light at a characteristic color visually detectable with a light microscope or other optical instruments. As in the EIA, the fluorescent labeled immunoglobulin is allowed to bind to the antigen-antibody complex. After removing unbound reagent, the remaining tertiary complex is exposed to light of the appropriate wavelength. The fluorescence observed indicates the presence of the bound antibody of interest. Immunofluorescence and EIA techniques are both well established in the art. It will be understood that other reporter molecules, such as radioisotopes, and chemiluminescent and/or bioluminescent molecules, may also be suitably employed in the screening methods disclosed herein.

### Altering the Affinity of Antibodies Expressed by a Single B Cell Clone

[0174] Further provided herein are methodologies for altering the antigen binding affinity and/or specificity of an immunoglobulin produced by the methods of the present invention. Once immunoglobulin producing cells are identified, the cells may subsequently be subjected to one or more mutagenesis methodologies in an effort to, for example, increase efficiency of immunoglobulin production and/or increase efficiency of binding to, and/or neutralizing, target molecules of interest.

[0175] The affinity and/or specificity of individual immunoglobulin expressing cells may be altered by inducing mutations into the immunoglobulin coding region. Mutagenesis may be achieved by a variety of methodologies currently available in the art such as, for example, chemical mutagenesis and UV irradiation.

[0176] Preferred methodologies utilize the cell's ability to randomly generate somatic mutations within the gene encoding the immunoglobulin. As indicated above, Burkitt's lymphoma cells have an innate capacity to mutate their antibody genes. Such an ability to mutate these genes may be exploited to generate immunoglobulins exhibiting one or more of these desired properties. Somatic mutation may, for example, be induced in Burkitt's lymphomas by cross-linking the surface Ig antigen receptor in the presence of activated human T cells. Denepoux et al., Immunity 6(1):35-46 (1997) and Zan et al., J. Immunol. 162(6):3437-47 (1999).

[0177] In those immunoglobulin expressing cells that do not undergo constitutive or inducible somatic mutations, an alternative methodology may be employed wherein the polynucleotide encoding the activation-induced cytidine deaminase (AICD) may be introduced into and expressed exogenously within the cell. AICD is required for somatic hypermutation (SHM) and isotype-switch recombination (CSR) of immunoglobulin (Ig) genes, both of which are associated with DNA double-strand breaks (DSBs). Without being limited to any specific theory of operation, it is thought that because AICD is capable of deaminating deoxy-cytidine (dC) to deoxy-uracil (dU), AICD can induce DNA transitions directly by deaminating deoxy-cytidine residues in immunoglobulin genes and to subsequently induce transversions via a dU-DNA glycosylase-mediated base excision repair pathway (‘DNA-substrate model’). Petersen-Mahrt et al., Nature 418(6893):99-103 (2002); and Di Noia et al., Nature 419(6902):43-48 (2002). Preferred methods comprise the step of introducing into the cell and/or library of cells a polynucleotide encoding human activation-induced cytidine deaminase (AICD) provided herein as SEQ ID NO: 38.

[0178] Further aspects of the present invention provide that the antigen specificity and/or affinity of immunoglobulins generated by any of the methods presented herein may be altered by introducing into the cells and/or libraries of cells a polynucleotide encoding Terminal Deoxynucleotidyltransferase (TdT) or a functional fragment, derivative or variant thereof. Most preferred is human TdT as disclosed herein in SEQ ID NO: 6. Preferably, the polynucleotide encoding TdT is introduced into the cells and/or library of cells coincident with the introduction of the polynucleotide(s) encoding the recombination-facilitating protein.

### Switching Antibody Isotype

[0179] Depending on the particular application contemplated, it may be desired to switch the isotype of immunoglobulin(s) generated by the methods of the present invention. Immunoglobulins generated by the methods disclosed herein are principally of the IgM isotype. Thus, further aspects of the present invention provide that cells expressing immunoglobulins and fragments thereof, generated by any of the methods presented herein may be further treated with an agonist, or combination of agonists, to induce switching from a first immunoglobulin isotype to a second immunoglobulin isotype. Within these aspects, the first immunoglobulin isotype may be selected from the group consisting of IgM, IgD, IgG1, IgG2, IgG3, IgG4, IgE, IgA1 and IgA2; the second immunoglobulin isotype may be selected from the group consisting of IgD, IgG1, IgG2, IgG3, IgG4, IgE, IgA1 and IgA2.

[0180] In one embodiment, the most effective isotype of immunoglobulins for a particular application are selected by exposing antigen-specific immunoglobulin expressing cells in tissue culture to combinations of agonists known to induce “switching” in antibody genes. As used herein, the term “isotype switching” refers to the recombination event whereby the Switch (S) region immediately 3′ to the active heavy chain V region exon undergoes somatic recombination with an S region associated with a 3′ constant region gene. Every immunoglobulin-expressing cell begins by expressing IgM. The same assembled V region may be expressed in IgG, IgA, or IgE immunoglobulins by a recombination event stimulated by one or more agonists, for example, cytokines released by T cells.

[0181] By way of example, not limitation, treatment of Burkitt's lymphoma cells with appropriate cytokines and/or mitogens induces switching away from the starting isotype (IgM) to other predictable Ig isotypes. Ledermnan et al., J. Immunol. 152(5):2163-71 (1994) and Cerutti et al., J. Immunol. 160(5):2145-57 (1998). Prolonged stimulation can also cause differentiation into plasmacyte-like cells that secrete large amounts of antibody. Cerutti, et al., supra. For example, CD40 ligand in conjunction with IL4 and/or IL10 may be employed to induce switching from IgM to IgG.

[0182] Suitable agonists for inducing isotype switching include, but are not limited to, (1) ligands for CD40 such as CD154, anti-CD40 or fresh T cells activated with, for instance, phytohaemoglutenin; (2) ligands for the B cell receptor such as anti-Ig or anti-Ig coupled to dextran; (3) B cell mitogens such as purified protein derivative from Mycobacterium species (PPD), bacterial DNA, or synthetic oligonucleotides containing unmethylated CpG dinucleotides; (4) cytokines such as IL2, IL4, IL5, IL6, IL10, IL13, TGFβ or IFNγ; (5) anti-CD19; and/or (6) anti-CD21. Cells expressing immunoglobulins may be exposed to one or more of these agonists alone or in combination.

### Utility of Immunoglobulins of the Present Invention

[0183] Immunoglobulins of the present invention are useful as diagnostic and therapeutic agents. With respect to their use as diagnostic agents, antigenic molecules may be detected using the immunoglobulin employing assays such as described herein. Useful target molecules for diagnostic purposes include microoganisms and eukaryotic cells or components thereof. Such components include receptors, flagella, pilli, polysaccharide, proteins, phospholipids, enzymes, nucleic acids and ribozymes amongst others. Examples of eukaryotic cells include yeast, fungi, animal cells, mammalian cells, human cells, parasitic cells, cancer cells and normal cells.

[0184] The immunoglobulins may also be employed as therapeutic agents including active ingredients in a pharmaceutical composition. Therefore, in further aspects of the present invention, the immunoglobulins described herein may be used to stimulate an immune response against cancer. Within certain embodiments, immunotherapy may be active immunotherapy, in which treatment relies on the in vivo stimulation of the endogenous host immune system to react against tumors.

[0185] The following Examples are offered by way of illustration not limitation.

### EXAMPLES

### Example 1

### Reversion of Immunoglobulin Expressing Lyphoma Cell Lines to a “Pro-B Cell-Like” Arrangement by Homologous Recombination

[0186] This Example demonstrates the construction of vectors and methodology suitable for reverting a V(D)J rearranged immunoglobulin expressing cell line to a pro-B cell-like state.

[0187] Burkitt's lymphoma cell lines BL2 and Ramos can mutate their antibody genes. Denepoux et al., Immunity 6:35-46 (1997) and Sale et al., Immunity 9:859-869 (1998). A Ramos sub-line (2G6.4C10) is also known to undergo Ig isotype switching and a sub-line of the BL16 Burkitt's lymphoma (CL-01) has been shown to undergo both efficient Ig isotype switching and Ig somatic mutation. Lederman et al., J. Immunol. 152:2163-2171 (1994); Zan et al., J. Immunol. 162:3437-3447 (1999); and Cerutti et al., J. Immunol. 160:2145-2157 (1998). These lines are therefore all useful as starting immunoglobulin expressing lymphoma cell lines for the production of reverted immunoglobulin expressing lymphoma lines.

[0188] (a) Cloning of Immunoglobulin Heavy Chain D to J Rearrangements Lacking a V Region

[0189] Immunoglobulin heavy chain D to J rearrangements utilizing several or all six of the human J regions, but lacking a V region are cloned from human peripheral blood lymphocytes (PBLs) by PCR as follows. Human PBLs are prepared from a healthy donor using standards means. Colligan et al., “Current Protocols in Immunology” (John Wiley & Sons Inc, 1999). A sense oligodeoxynucleotide complementary to sequences upstream (5′) of the recombination signal sequence (RSS) belonging to human D region D3-10 (a commonly used D region) is paired with an antisense oligodeoxynucleotide complementary to sequences downstream (3′) of the RSS of each one of the six human J gene segments in 6 separate PCR reactions using DNA extracted from human PBLs as template. Corbett et al., J. Mol. Biol. 270:587-597 (1997). The sequences on which the primers (primers 5-15 correspond to SEQ ID NOs: 15-26) are based are in Genbank accessions AB019437-AB019441 (presented herein as SEQ ID NOs: 30-34). The DJ1, DJ2, DJ3, DJ4, DJ5, and DJ6 PCR products are cloned in an array immediately 3′ to the VH4-34 promoter and gpt selectable marker sequences. FIG. 1.

[0190] (b) Assembly of the Ramos Immunoglobulin V(D)J Replacement Vector

[0191] A region of approximately 4.6 kb immediately flanking the 5′ end of the Ramos canonical V(D)J rearrangement and including the promoter attached to the V_{H}4-34 gene segment is amplified by PCR using primers “5′VH4-34(KpnI)” and “3′VH4-34(ApaI)” (primers 1 and 2 in FIG. 1) and cloned immediately 5′ to the gpt selectable marker sequence, and a region of 2.1 kb flanking the 3′ end of the Ramos VDJ rearrangement is amplified by PCR using primers “5′JH63′fl(NotI)” and “3′JH63′fl(SacII)” (primers 17 and 18 in FIG. 1) and cloned immediately 3′ to the cluster of fused DJ regions to give the V(D)J-replacement construct disclosed in FIG. 1.

[0192] (c) Introduction of the Immunoglobulin VDJ_{H} Replacement Vector into Ramos

[0193] Ramos cells that are positive for surface Ig expression are selected by fluorescence-activated cell sorting (FACS) after staining with fluorescent anti-IgM antibodies. The vector described above and depicted in FIG. 1 is linearized and ˜20 μg is introduced by electroporation into these Ramos.2G6.4C10 cells (using 2×10⁷ cells, a 4 mM electrode gap, 0.25 kV, and 960 μF). After 24 hours in complete medium (RPMI containing 10% v/v fetal calf serum and 50 μM 2-mercaptoethanol), to allow the cells to recover from the shock of electroporation, the medium is supplemented with mycophenolic acid (2.5 μg/ml), xanthine and hypoxanthine. About 10-20 days after electroporation, clones that may have undergone homologous recombination with the introduced DNA are selected by the following two criteria: (A) resistance to mycophenolic acid which is conferred by expression of the gpt gene as a result of integration near enhancers functional in Ramos cells (e.g., the immunoglobulin heavy chain enhancers), and (B) stable loss of surface immunoglobulin expression (determined by FACS), possibly as a result of replacement of the expressed immunoglobulin heavy chain rearrangement with the VH4-34/gpt/DJ cassette. Homologous recombination is confirmed by Southern blot analysis and PCR-screening of mycophenolic acid-resistant IgM^{-ve} clones using (a) primer “5′D3-10.6” with primer “3′outside” (primers 15 and 21 in FIG. 1) and (b) primer jo1209 with primer jo191 (priming sites illustrated in FIG. 3D). DNA from homologously recombined clones produces a 3.3 kb PCR product when amplified with primers “5′D3-10.6” and “3′outside”, and fails to produce a product when amplified with primers jo1209 and jo191. Homologously recombined clones are called “Ramos.proB” cells.

[0194] It is not necessary to revert the Igλ locus to germline- or pro-B cell like arrangement in Ramos because functional Vλ segments and unrearranged Jλ gene segments are still present in both the expressed and non-expressed Ramos Igλ alleles. See, Sale et al., Immunity 9:859-869 (1998) and Corbett et al., J. Mol. Biol. 270:587-597 (1997).

### Example 2

### Reversion of Lymphoma Cell Lines to a “Germline-Like” Arrangement by Chromosome Replacement

[0195] This Example demonstrates the introduction of whole human chromosomes to achieve reversion of a V(D)J rearranged, immunoglobulin expressing cell line to a germline-like state.

[0196] The immunoglobulin heavy chain locus in human cells is on chromosome 14. Many Burkitt's lymphoma cell lines, including Ramos, carry one normal chromosome 14 from which the expressed immunoglobulin heavy chain is produced, and one abnormal chromosome 14 carrying a translocation to chromosome 8. The nature of the translocation in Ramos is such that the translocated chromosome 14 cannot express functional immunoglobulin heavy chain protein. Wiman et al., Proc. Nat. Acad. Sci. USA 81:6798-6802 (1984).

[0197] The normal chromosome 14 in Ramos, which carries the immunoglobulin heavy chain VDJ rearrangement, and one of the copies of chromosome 2, which carries the immunoglobulin kappa light chain locus, are replaced by chromosomes carrying the immunoglobulin heavy and kappa light chain loci in germline form by microcell-mediated chromosome transfer (MMCT) as outlined below.

[0198] Mouse A9 cells carrying a single copy of human chromosome 2, 14 or 22 have previously been produced. These cell lines are called A9+2, A9-Hytk2, A9-Hytk14, A9-Hytk22 and A9+22, respectively. Cuthbert et al., Cytogenetics & Cell Genetics 71(1):68-76 (1995); Ning et al., Cytogenetics & Cell Genetics 60(1):79-80 (1992) and Ning et al., Genomics 16(3):758-760 (1993). The human chromosome in cell lines A9+2 and A9+22 (chromosomes 2 and 22, respectively) is tagged by a provirus carrying a neomycin resistance gene (neo^{R}), while the human chromosomes in A9-Hytk2, A9-Hytk14 and A9-Hytk22 are tagged by a provirus carrying a hygromycin phosphotransferase (hph):herpes simplex virus thymidine kinase (HSVtk) fusion gene (called Hytk) driven by a proviral LTR. Id.

[0199] Microcells are made from cell line A9-HyTK14 and fused to Ramos cells using published methods. e.g. Hunt, Anal. Biochem. 238:107-116 (1996). After 48 hour in complete medium (RPMI+10% v/v fetal calf serum+50 μM 2-mercaptoethanol) to allow the Ramos cells to recover from the shock of fusion, the medium is supplemented with hygromycin B to a concentration of 800 units/ml. About 10-20 days after fusion, colonies that may have undergone chromosome replacement are selected by the following two initial criteria: (A) resistance to hygromycin B antibiotic (800 units/ml) which is conferred by expression of the HyTK gene as a result of acquiring all or part of the tagged human chromosomes carried by the A9HyTK14 cells, and (B) loss of surface immunoglobulin expression (determined by FACS), possibly as a result of replacement of the original Ramos chromosome 14 that expressed an immunoglobulin chain gene rearrangement. Hygromycin-resistant colonies containing high numbers of surface Ig-^{-ve} cells are depleted of surface Ig^{+ve} cells using biotin-conjugated anti-IgM antibody and streptavidin-coated magnetic beads and cloned by limiting dilution.

[0200] Acquisition of an array of germline immunoglobulin heavy chain gene segments is confirmed in these clones by PCR with primers that detect IgH gene segments normally absent from Ramos cells (for instance gene segments J_{H}1 to J_{H}4, see FIG. 3A) or by restriction mapping (See Matsuda et al., Nat. Genet. 3:88-94 (1993)). Loss of the VDJ-rearranged immunoglobulin heavy chain locus is detected by PCR with primers that detect the Ramos canonical VDJ_{H}-rearrangement (also see FIG. 3A). Clones that have acquired germline IgH gene segments and that have loss the Ramos canonical VDJ_{H}-rearrangement are selected and called “Ramos.glH” cells, where “gl” indicates that these cells contain immunoglobulin regions in a germline-like state. Microcells are then made from cell line A9+2 using the same procedure as above and separately fused to Ramos and Ramos.glH cells. After 48 hour in complete medium, the medium is supplemented with G418 to a concentration of 3 mg/ml. G418-resistant colonies are then screened by PCR (using primers jo1266-5′-GAC TCT AGA GCA GCT CCA AAG ATG GCA TGC G-3′ (SEQ ID NO: 57) and jo1267-5′-GTT TGA ATT CCA CCT TGG TCC CTT GG-3′ (SEQ ID NO: 58)) for the Jκ1 gene segment which is normally absent from Ramos cells. Clones that acquired the Jκ1 gene segment are selected. Clones resistant to both G418 and hygromycin (derived from MMCT between A+2 and Ramos.ghL cells) are called Ramos.glκH cells, while clones resistant to G418 only (derived from MMCT between A+2 and Ramos cells) are called Ramos.glκ cells.

[0201] Microcells are then made from cell line A9+22 using the same procedure as above and separately fused to Ramos and Ramos.glH cells. After 48 hour in complete medium, the medium is supplemented with G418 to a concentration of 3 mg/ml. G418-resistant colonies are then screened by PCR (using primers kam8-5′-CCT GCT CTG GAG ATA AAT TGG G-3′ (SEQ ID NO: 59) and kam9-5′-CTG CTG TCC CAC GCC TGA CA-3′ (SEQ ID NO: 60)) for the 3′ distal Vλ gene segment 3r (or DPL23) which is normally absent from Ramos cells. Clones that acquired Vλ gene segment 3r are selected. Clones resistant to both G418 and hygromycin (derived from MMCT between A+22 and Ramos.ghL cells) are called Ramos.glλH cells, while clones resistant to G418 only (derived from MMCT between A+22 and Ramos cells) are called Ramos.glλ cells.

[0202] As an alternative procedure for introducing germline IgL gene segments, Ramos cells or ganciclovir-resistant Ramos-glH cells (i.e. which have lost the Hytk gene by recombination) could be fused with microcells derived from A9-Hytk2 and A9-Hytk22 cells. Lymphoma cells that had taken up germline IgL gene segments would be detected by PCR screening (as above) of the hygromycin-resistant colonies generated.

[0203] (a) Reversion of a Ramos Cell Line to a “Germline-Like ” IgH Arrangement by Chromosome Replacement with Human Chromosome 14

[0204] Using MMCT, a human chromosome 14 carrying a germline IgH allele from A9-HytK-14 cells was transferred to Ramos. Several stable hygromycin resistant cell lines (designated RK1.1 to RKB1.9) were produced and shown by flow cytometry to be CD19-positive (data not shown) and to contain a mixture of surface Ig-positive and -negative cells. FIG. 3B. PCR amplification from genomic DNA was used to confirm that these cell lines carried J_{H} gene segments normally absent from Ramos cells. FIG. 3A. In order to select sub-lines that had lost the VDJ_{H}-rearrangement originally present in Ramos, cells from two of these lines were depleted of surface Ig-positive cells using magnetic beads then cloned by limiting dilution. FIGS. 3B and 3C. Some of these sublines (designated RK2.1/1, RK2.2/1, RK2.2/2, RK2.2/3 and RK2.2/4) expressed a permanent IgM^{-ve} phenotype, appeared to have lost t he VDJ_{H} rearrangement canonical to Ramos, and to have kept the J_{H} gene segments introduced by MMCT (FIGS. 3C and 3D). Others retained the canonical VDJ_{H}-rearrangement regardless of whether they contained surface Ig-positive cells (e.g., line RK2.2/5) or not (e.g., lines RK2.1/2, RK2.1/3, RK2.1/4 and RK2.1/5). These latter lines presumably lost surface Ig expression as a result of AICD-mediated mutation of the rearranged IgH or Igλ genes normally present in Ramos (see Sale et al., supra).

[0205] In order to convert Ramos cells into a practicable fusion partner, they were rendered resistant to G418 by stable transfection via electroporation (2×10⁷ cells, 0.3 ml RPMI medium, 0.25 kV, 960 μF, 0.4 cm electrode gap) with plasmid pCDNA3-RAG1 (see below). To transfer a “germline” chromosome 14 into these cells, microcells were made from A9-Hytk14 cells (Cuthbert et al., Cytogenet Cell Genet. 71(1):68-76 (1995)), fused to the G418-resistant Ramos cells using a protocol adapted from Hunt, Anal. Biochem., supra; Killary et al., Methods: A companion to Methods in Ezymology. 9:3-11 (1996) and Sanford et al., Som. Cell Mol. Genet. 13:279-284 (1987). Nine G418 (3 mg/ml, Sigma Aldrich, St Louis, Mich.) plus hygromycin (1000 U/ml, ICN Biochemicals, Aurora, Ohio) double-resistant colonies (originally designated Ram-14-c1 to Ram-14-c9 and later designated RK1.1 to RK1.9) were selected.

[0206] RK1.1 and RK1.2 cells were labeled with biotin-conjugated anti-IgM (Caltag, San Francisco, Calif.) then depleted of surface Ig-positive cells using streptavidin-conjugated magnetic beads (Miltenyi Biotech Inc., Auburn, Calif.) according to the manufacturer's instructions. Cells were plated at a density of ≦10 cells/well and the resulting colonies propagated as lines RK2.1/x and RK2.2/x where x=1 to 27.

[0207] DNA was extracted from cells using standard techniques and used in 35-cycle PCR reactions to detect IgH J gene segments J_{H}1 (with primer “A”, SEQ ID NO: 43, 5′-GGT CAC CGT CTC YTC AGG T-3′ and primer “B”, SEQ ID NO: 44, 5′-GAT ATC GAT ACC AGT AGC ACA GCC TCT G-3′), J_{H}2 (with primer “A” and primer “C”, SEQ ID NO: 45, 5′-CTG GAA TTC TGC AGG ACA CTC GAA TGG-3′), J_{H}3 (with primer “A” and primer “D”, SEQ ID NO: 46, 5′-TGC GGA TCC ACC TGA CTC TCC GAC TGT CC-3′), J_{H}4 (with primer “A” and primer “E”, SEQ ID NO: 47, 5′-CTA ACT AGT TGG GAC CCT CTC AGA CT-3′), J_{H}5 (with primer “A” and primer “F”, SEQ ID NO: 48, 5′-CCA TCT AGA CAG AGA CCT TCT GTC TCC G-3′) and J_{H}6 (with primer “A” and primer “G”, SEQ ID NO: 49, 5′-TGA GCG GGC CGC GGC CTC AAT TCC AGA CAC AT-3′), or the Ramos canonical VDJ_{H} rearrangement described in Sale et al. (Immunity, supra) (using primers jo1209, SEQ ID NO: 50, 5′-ATG AAA CAC CTG TGG TTC TTC CTC C-3′ and jo191, SEQ ID NO: 51, 5′-CGG GTA CCA ACC TGC AAT GCT CAG GA-3′). FIGS. 3A through 3D.

[0208] PCR products resolved by agarose gel electrophoresis were detected with ethidium bromide and are flanked by 100 bp DNA ladders. FIG. 3A. J_{H}1 to J_{H}4 are normally absent from Ramos, but were present in the double-resistant lines. One copy of J_{H}5 and two copies of J_{H}6 appeared to be already present in Ramos. Histograms representing surface Ig expression by viable (i.e. PI-excluding) cells are presented in FIG. 3B ((light line) Control Ramos cells cultured for 5 weeks after single-cell cloning, (bold dotted line) line RK1.1 after 9 weeks culture, (bold line) line RK1.2 after 9 weeks culture, (shaded) RK1.1 and RK1.2 cells 2 days after depletion for surface IgM-positive cells.) As shown in FIG. 3C, IgM production by limit clones (RK2.1/1 to 5 and RK2.2/1 to 5) was determined by flow cytometry after staining fixed and permeabilised cells with PE-conjugated anti-IgM ((shaded histograms) lines RK2.1/1 to 5 and RK2.2/1 to 4, (dotted white histogram) line RK2.2/5). The absence of the rearranged V(D)J_{H} gene segment in some surface Ig-depleted Ramos-glH sub-clones is shown in the agarose gel of FIG. 3D. PCR with (top) primers A and B was used to detect the J_{H}1 gene segment introduced by MMCT and with (bottom) primers jo1209 and jo191 to detect the VDJ sequence normally present on the VDJ-rearranged chromosome 14 carried by the parent Ramos cells. The source of the genomic DNA templates is indicated at the bottom of the figure.

### Example 3

### Induction of Gene Rearrangement in Reverted Lymphoma Cell Lines

[0209] (a) Cloning of cDNAs Encoding RAG-1, RAG-2 and TdT

[0210] In combination with housekeeping DNA repair pathways, the two RAG proteins, RAG-1 and RAG-2 (included in SEQ ID NOs: 2 and 4, respectively) are sufficient to carry out immunoglobulin V(D)J recombination in any cell while the TdT protein (included in SEQ ID NO: 6) is required for the insertion of random “N” nucleotides into the V(D)J junctions. These three proteins are referred to herein as “V(D)J recombinase.” Oettinger et al., Science 248:1517-1523 (1990) and Komori et al., Science 261:1171-1175 (1993).

[0211] DNA sequences encoding the human proteins RAG-1 and RAG-2 were PCR-amplified using DNA extracted from human cells as template and using PCR primers based on sequences in SEQ ID NOs: 1 and 3, respectively. A plasmid (MRE30) containing a human TdT cDNA sequence (SEQ ID NO: 5) was a gift of Micheal Ehrenstein and Michael Neuberger (MRC Laboratory of Molecular Biology, Cambridge, UK). See Sale and Neuberger, Immunity 9: 859-869 (1998). RAG-1, RAG-2 and TdT sequences were cloned into plasmid vectors that drive transient high level expression of introduced genes in human cells when introduced by transfection and/or adenoviral transduction.

[0212] (i) Expression of RAG1

[0213] Western blotting of total cell extracts revealed that RAG1 protein was readily detectable in non-transfected Ramos cells. FIG. 4. Nonetheless, to ensure that RAG1 expression was stable, the RAG1 coding sequence was cloned by PCR amplification from human genomic DNA into the expression vector pcDNA3™ (Invitrogen Corporation, Carlsbad, Calif.) to produce plasmid pcDNA3-RAG1 (CJ087, SEQ ID NO: 40). This plasmid was stably introduced into Ramos cells by electroporation and selection with 3 mg/ml G418.

[0214] (ii) Western Blot Detection of RAG1 and TdT Proteins

[0215] Protein extracts of Ramos cells and Ramos cells transfected with plasmid MRE30 were prepared by boiling in SDS-PAGE loading buffer for 10 min. Extracts were resolved by SDS-PAGE and electro-blotted onto PVDF membrane (Bio-Rad Laboratories, Inc., Hercules, Calif.). Blots were probed using rabbit anti-human RAG1 (Santa Cruz Biotechnology Inc., Santa Cruz, Calif.) and mouse anti-human TdT (Dako Corporation, Carpinteria, Calif.)) antibodies. Bound antibodies were detected using peroxidase-conjugated anti-rabbit, or anti-mouse IgG (Santa Cruz Biotechnology), respectively, and chemiluminescense (Super Signal Substrate, Promega Corporation, Madison, Wis.).

[0216] (iii) Doxycycline-Regulated Expression of RAG2 and TdT

[0217] The reverse tetracycline-controlled transactivator (rtTA) sequence (CLONTECHniques XI(3):2-5 (1996); Gossen et al., Proc. Natl. Acad. Sci. USA 89:5547-5551 (1992); and Gossen et al., Science 268:1766-1769 (1995)) was sub-cloned from pRevTET-ON™ (BD Biosciences/Clontech, Palo Alto, Calif.) into the multi-cloning site of pIRESpuro2™ (BD Biosciences/Clontech) to produce plasmid pIRES-rtTA-puro (SEQ ID NO: 41, FIG. 5A). A sequence encoding mouse RAG2 N-terminally fused to enhanced green fluorescent protein (GFP), which was a gift of Dr Eugene Oltz (Vanderbilt University Medical School, Nashville, Tenn.) was sub-cloned into multi-cloning site I of the vector pBI (BD Biosciences/Clontech). A human TdT-encoding cDNA sequence was then sub-cloned from plasmid MRE30 into multi-cloning site R of the same plasmid to produce plasmid pBI-TdT-GFP.RAG2 (SEQ ID NO: 42). This plasmid (FIG. 5B) permits co-expression of TdT and GFP-RAG2 proteins in response to doxycycline in cells already expressing rtTA. Plasmids pBI-TdT-GFP.RAG2 and pIRES-rtTA-puro were co-transfected into RK2.1/4 cells and RK2.2/3 cells by electroporation and puromycin (10 μg/ml) resistant colonies were selected. Puromycin-resistant transfectants that exhibited enhanced GFP fluorescence in response to doxycycline (FIG. 5C) were designated RK5.7 and RK5.9, and RK6.6 and RK6.13, respectively.

[0218] (iii) Construction of Human Rag-2-Expressing Adenovirus Particles

[0219] Recombinant non-replicating adenovirus particles that could drive transient high level expression of RAG2, GFP, or GFP-RAG2 fusion protein were produced using the AdEasy™Adenoviral Vector system (Qbiogene, Inc., Carlsbad, Calif.). Briefly, sequences encoding RAG2 and the GFP-RAG2 fusion protein were separately cloned into the pShuttle-CMV plasmid (Stratagene, La Jolla, Calif.) to produce plasmids pShuttle-RAG2 and pShuttle-GFP-RAG2 (SEQ ID NOs: 52 and 53, respectively). The human RAG2 gene was amplified from Ramos genomic DNA by PCR using primers 5′-CAG ACA AGC TTC TAC GTA CCA TCA GA-3′ and 5′-GAT CAG AAT TCC TCA GTG AAG AAT A-3′ (SEQ ID NOs: 36 and 37, respectively). The resulting PCR product was cloned into the multi-cloning site of plasmid vector pShuttle-CMV (Stratagene, FIG. 2A). Similarly, the GFP-RAG2 sequence was sub-cloned into the multi-cloning site of plasmid vector pShuttle-CMV.

[0220] Full-length adenoviral DNAs carrying the RAG2 or GFP-RAG2 genes were created by homologous-recombination of pShuttle-CMV constructs with the pAdEasy-1 vector (Stratagene) in E. coli strain BJ5183 cells. FIG. 2B. By these methods, the plasmids pAdRAG2 and pAdGFP-RAG2 were produced. (SEQ ID NOs: 54 and 55, respectively). FIG. 2C. Purified pAdGFP (provided by Charles Bailey, Centenary Institute, and encoding a GFP-producing recombinant adenoviral genome, Shayakhmetov et al., J. Virol. 74(6):2567-2583 (2000)), pAdRAG2, and pAdGFP-RAG2 plasmids were digested with Pacd enzyme to liberate linear recombinant Adenoviral genomes and the linear DNAs were separately transfected into HEK293T cells to produce recombinant non-replicative adenovirus particles that could be used to infect Ramos cells. FIG. 2D.

[0221] (iv) Selection of Adenovirus-Susceptible Ramos Cells

[0222] Recombinant non-replicative adenovirus particles were produced from transiently-transfected HEK293T, amplified in HEK293T cultures and titred on AD293 cells following the protocols provided with the AdEasy™ Adenoviral Vector system kit (Stratagene). GFP-expressing recombinant adenoviral particles were used to transiently infect Ramos cells and cell lines derived from Ramos at MOI of 100. Two days after infection, cells expressing high levels of GFP were isolated using a FACStar Plus flow cytometric cell sorter (Beckton Dickenson). Sorted cells were later re-infected with GFP-adenovirus and the sort procedure repeated.

[0223] Initial experiments using recombinant GFP-expressing particles revealed that Ramos cells were relatively resistant to adenovirus infection when compared to NIH 3T3 cells. FIG. 6. Selection by flow cytometry for Ramos cells that expressed high levels of GFP during transient infection with non-replicating GFP-expressing a denovirus produced a cell line more susceptible to adenovirus infection than the starting cells. FIG. 6.

[0224] As an alternative approach to increasing susceptibility to infection, the human cocksackie-adenovirus receptor (CAR) cDNA was amplified by PCR from HEK293T cells using primers jo1272-CCA TCG ATG CCT ACC TGC AGC CGC CGC CC and jo1273-CGG GAT CCG AGG CTC TAT ACT ATA GAC (SEQ ID NOs: 61 and 62, respectively). The PCR product was sequenced and cloned into both pIRESneo and pIRESpuro2 plasmid vectors (BD Biosciences/Clontech) to generate plasmids pCAR-IRES-neo (pCJ124, SEQ ID NO: 63) and pCAR-IRES-puro (pCJ126, SEQ ID NO: 64).

[0225] Ramos cells were transfected with pCAR-IRES-neo DNA and G418 (3 mg/ml)-resistant colonies were subsequently screened for susceptibility to a denovirus infection by transiently infecting with the non-replicating GFP-adenovirus particles. The line displaying the highest levels of GFP expression 4 days later, as determined using a FACSCalibur flow cytometer (Becton, Dickinson and Company, Franklin Lakes, N.J.), was selected as the “adenovirus-susceptible” line RD1. FIG. 6.

[0226] (b) Transduction and Selection of Lymphoma Cells that Underwent New Rounds of V(D)J Recombination

[0227] Immunoglubulin gene-reverted Ramos lines (Ramos.proB, Ramos.glk, Ramos.glkH and Ramos.glH) are converted into adenovirus-susceptible lines by either of the methods described above. The RAG-2- or GFP-RAG2-expressing adenovirus particles are then used to infect (at MOI of 100:1) the immunoglobulin gene-reverted Ramos cells, as described above.

[0228] Transient expression of genes transduced into susceptible Ramos cells by infectious Adenovirus particles produced from pAdEasy-1 plasmid DNA occurs in greater than 40% of Ramos cells for up to five days after transduction. In the absence of selection for the retention of pAdEasy-1 DNA sequences, the circular adenoviral DNA (and hence RAG-2 expression) is lost as the cells divide. Expression of a functional V(D)J recombinase is detected by the appearance of surface immunoglobulin on some transfected cells as determined by staining with fluorescent anti-immunoglobulin antibodies and FACS.

[0229] (c) Fusion of RK2.2/3 Cells to Fresh Human B Cells

[0230] An alternative to inducing V(D)J recombination by introduction of a V(D)J recombinase is the fusion of a reverted pro-B cell-like or germline-like cells to fresh B cells.

[0231] (i) Isolation of Primary Human B Cells from Blood

[0232] Human blood (≧50 ml) is collected into heparin-coated tubes and diluted 1:1 with PBS at room temperature. Two volumes of blood are layered over one volume of Histopaqueo (Sigma-Aldrich, St. Louis, Mo.) or equivalent at room temperature and centrifuged at 800× g for 20 minutes at room temperature with no brake. The layer of white cells at the interface is recovered into a fresh tube and four volumes of PBS at 4° C. is mixed in. The cells are pelleted at 250× g for 5 minutes at 4° C., washed three more times with cold PBS, then counted. Alternatively, pooled buffy coats, human spleens, tonsils, lymph nodes, bone marrow or cord blood may be used as the source of B cells or plasmacytes.

[0233] Populations of primary human cells enriched for B cells and plasmacytes using, for instance, MACS® beads conjugated to anti-human CD19 or CD20 (Miltenyi Biotec, Germany) or using Dynabeads® conjugated to anti-human CD19 or CD20 (Dynal Biotech, Norway) plus DETACHaBEAD® CD19 or CD20 (Dynal Biotech, Norway) may be used for the following step. However, total peripheral blood nucleated cells, or splenic, tonsil, lymph node, bone marrow or cord blood cell populations depleted of red blood cells using, for instance Histopaque®, could also be used.

[0234] (ii) Fusion to RK2.2/3 Cells

[0235] A number of hybridoma fusion methodologies are readily available in the art. See, for example, “Antibodies: A Laboratory Manual” (ed. Harlow and Lane, Cold Spring Harbor Laboratory (1988)); “Monoclonal Antibodies: A Manual of Techniques (Zola et al., CRC Press (1987); “Rat Hybridomas and Rat Monoclonal Antibodies” (ed. Herve Bazin, CRC Press (1990); and Shirahata et al., Methods Cell Biol. 57:111-45 (1998). Most of these methodologies are suitable for generating fusions to Ramos or Ramos-derived cell lines.

[0236] The following exemplary fusion methodology may be employed to, for example fuse RK2.2/3 cells (“germline-IgH-reverted”) with human B cells. RK2.2/3 cells are grown to mid-log phase and mixed with freshly isolated human B cells at a ratio of 1:2. The mixed cells are pelletted at 250× g and washed once with serum-free RPMI medium. The cell pellet is resuspended, dropwise over 1 minute with gentle mixing at 37° C., in 0.8 ml polyethylene glycol (PEG, molecular weight 1300-1600) working solution (5 g PEG (Sigma-Aldrich, Catalogue No. P7777) plus 2.5 ml water) per 10⁷ RK2.2/3 cells. The tube is held at 37° C. for one minute while tapping gently to mix. RPMI medium (1 ml) at 37° C. is added over 1 minute with gentle mixing, then 20 ml RPMI at 37° C. is added over 4 minutes with gentle mixing. The cells are pelletted at 250× g for 7 minutes, resuspended in 20 ml culture medium (RPMI, supplemented with 10% (v/v) fetal calf serum and 50 μM 2-mercaptoethanol) and plated.

[0237] Alternatively, RK2.2/3 cells could be fused with primary human B cells by “electrofusion.” Zimmermann et al., Adv. Biotechnol. Processes 4:79-150 (1985); Finaz et al., Exp. Cell Res. 150(2):477-82 (1984); Vienken et al., FEBS Lett. 163(1):54-6 (1983); and Caude et al., Biochem. Biophys. Res. Commun. 114(2):663-9 (1983).

[0238] (iii) Selection for Fused Cells

[0239] 48 hours after fusion, an additional 20 ml culture medium containing ganciclovir (5 μM) is added to the plated cells. This permits positive selection for RK2.2/3 cells that have replaced the Hytk-tagged “germline” chromosome 14 with a VDJ-rearranged chromosome 14 taken up from a primary human B cell.

[0240] (c) Purification of Surface-Immunoglobulin-Positive Cells

[0241] Two to twenty days after inducing expression of VDJ-recombinase or after fusing to fresh human B cells, viable cells are purified by layering on Ficoll-Paque® (Amersham Pharmaica Biotech AB, Uppsala, Sweden) at 800× g for 15 minutes then labeled with anti-human Igκ and anti-human Igλ Fab fragments conjugated to biotin. Cells that have successfully undergone new immunoglobulin gene V(D)J rearrangements are purified by virtue of their adherence to MACS strepatavidin MicroBeads as described by the manufacturer (Miltenyi Biotec, Bergisch Gladbach, Germany) and returned to culture in complete medium. The purified surface immunoglobulin-positive cells form the primary libraries of human monoclonal antibody-producing cells.

[0242] The libraries of V(D)J-rearranged lymphomas generated can be screened using combinations of panning and flow cytometry. Panning involves incubating Theramab library cells on ice in sterile medium with an excess of clinically relevant antigen conjugated to beads or to a plastic surface. The cells that bind to the antigen are recovered as a ‘positively selected library’. The positively selected library is returned to culture to expand the desired cell lines and the selection process repeated until the majority of cells in the library bind to the model antigen. Two or three rounds of this process can greatly enrich for cells expressing the appropriate antigen receptors. The degree of enrichment in each round can be assessed by surface-staining the selected cells with recombinant soluble antigen followed by flow cytometric analysis. Flow cytometry can also be used directly to purify individual monoclonal antibody-expressing clones of interest after initial panning. We have used panning and flow cytometric protocols to purify clones with specificity for the model antigen, phenoloxazolone (phOx, FIG. 7). A Ramos line (RCC64) specific for phOx was engineered by introducing plasmids encoding BCR heavy and light chains with V(D)J regions originally cloned from a mouse anti-phOx hybridoma. Kaartinen et al., J. Immunol. 130(2):937-45 (1983); Williams et al., Immunity 13:409-417 (2000).

[0243] The majority of RCC64 cells thus express a BCR consisting of IgM and Igκ chains carrying mouse V(D)J rearrangements conferring specificity for phOx. A culture of 10⁸ unmanipulated Ramos cells was “spiked” with 10² RCC64 cells, giving a frequency of one RCC64 cell for every 10⁶ unmanipulated Ramos cells. The cells were pelleted and incubated on ice in 5 ml PBA containing 0.2 μg/ml phOx₁₅-BSA-biotin conjugate for 30 minutes. The cells were pelleted twice to wash, then positively selected with streptavidin-conjugated MACS magnetic beads and an MS column according to the manufacturer's instructions (Miltenyi Biotec, Germany). The selected cells were mixed with 10⁴ “feeder” Ramos cells and returned to culture. After 3 days expansion in culture, an aliquot of cells was analysed for surface staining with phOx₁₅-BSA conjugate. It was thus evident that the first purifiaction step had achieved a 600-fold enrichment for phOx-binding cells. FIGS. 7A and 7B. Phenyloxazolone-binding cells were a further 42-fold enriched using a FACSVantage flow cytometer (Becton, Dickinson and Company, Franklin Lakes, N.J.) and low purity, high throughput settings. FIGS. 7B and 7C. This enriched population was immediately re-sorted for phOx-binding cells, but this time using high purity, low throughput settings to achieve a further 38-fold enrichment. This procedure gave a final purity of phOx-binding cells of 96% in less than two weeks—an enrichment of 9.6×10⁵-fold.

[0244] (d) Expansion and Storage of Selected Libraries

[0245] The antibody libraries are expanded by culturing the surface-immunoglobulin-positive cells in complete medium (described above) at densities of 2×10⁵ to 2×10⁶ cells/ml. Aliquots of 10⁸ cells are pelleted from culture medium at 250× g, resuspended in 2 ml culture medium+10% DMSO and slowly chilled to the temperature of liquid nitrogen using standard techniques. Bonifacino et al., “Current Protocols in Cell Biology” (John Wiley & Sons Inc., 1999). The library aliquots are cryo-preserved in liquid nitrogen.

### Example 4

### Isolation of Fully Human Monoclonal Antibodies to Human Rhesus Factor (Blood Group Antigen RhD)

[0246] The RhD factor or rhesus factor is an erythrocyte surface antigen. RhD incompatibility is a condition that occurs when a woman of RhD-negative blood type (˜15% of the population) is exposed to RhD-positive blood cells and subsequently produces circulating antibodies to RhD factor. RhD incompatibility commonly occurs when a pregnant RhD-negative woman is exposed to RhD-positive fetal erythrocytes, and is potentially fatal for the fetus. Maternal exposure to the fetal blood cells can occur as a result of spontaneous or induced abortion, trauma, invasive obstetrical procedures, or delivery. This example demonstrates the preparation and isolation of cells that express fully-human monoclonal antibodies having RhD antigen specificity.

[0247] (a) Production of the Selecting Antigens

[0248] Using cDNA synthesized from human reticulocyte RNA as template, and using primers based on Genbank accession L08429 (SEQ ID NO: 38), the coding region for the human RhD blood group antigen is cloned by PCR into the pcDNA3.1 plasmid vector. CHO cells are stably transfected with the RhD construct by electroporation (using 2×10⁷ cells, a 4 mM electrode gap, 0.25 kV, and 960 μF) and selected for by G418. RhD^{+ve} CHO clones (identified using anti-RhD monoclonal antibodies; Perera et al., Transfusion 40:846-55 (2000)) are expanded in culture. RhD^{+ve}-erythrocytes and RhD^{-ve}-erythrocytes separately pooled from multiple donors (provided by the Red Cross) are fixed with 2% paraformaldehyde, reacted with sulfo-NHS-biotin (Pierce, Rockford Ill., USA) to label the cells with conjugated biotin, then washed three times with phosphate buffered saline (PBS).

[0249] (b) Selecting for Cells that Bind the RhD Antigen

[0250] Libraries of V(D)J-rearranged lymphoma cells are incubated on ice in sterile medium with an excess of RhD-negative human blood cells. The lymphoma cells that do not bind to the RhD-negative blood cells are recovered as a “negatively-selected library”—these are lymphomas that do not make non-specific antibodies against blood cells. The negatively selected lymphoma library is incubated with RhD-positive human blood cells, and lymphoma cells that bind to the RhD-positive cells (“positively-selected library”) are recovered. The positively selected library is returned to culture to expand the desired lymphomas, and the selection process repeated until the majority of lymphomas in the library bind RhD-positive cells and not-RhD-negative cells.

[0251] Two or three rounds of this process may be required to enrich for cells expressing RhD factor-specific immunoglobulins. Surface-staining the selected Burkitt's lymphoma cells with recombinant soluble RhD factor followed by FACS analysis will be used to assess the degree of enrichment in each round. Similarly, FACS may be used to purify useful individual monoclonal antibody-expressing clones. Details of these procedures are presented below.

[0252] An aliquot (10⁸ cells) of the Ramos monoclonal antibody library is thawed quickly at 37° C., washed in complete medium and cultured for 24 hour to recover from thawing. The cells are resuspended in 5 ml ice-cold complete medium. Fixed biotinylated RhD^{-ve}-erythrocytes (10¹⁰) are resuspended in another 5 ml ice-cold complete medium. The two cell suspensions are combined and gently mixed for 20 min at 20° C. The cell suspension is divided between two 15 ml centrifuge tubes, underlayed with an equal volume of Ficoll-Paque® (Amersham Pharmaica Biotech AB, Uppsala, Sweden) and centrifuged for 15 min at 800× g at 20° C. The cells floating on top of the high-density solution are recovered, washed with ice-cold PBS+0.5% bovine serum albumin (PB), and resuspended in ice-cold PB to 10⁸ cells/ml. Dead cells and cells that bind to non-RhD erythrocyte antigens or to biotin are depleted from the library by this procedure.

[0253] MACS strepatavidin MicroBeads (Miltenyi Biotec, Bergisch Gladbach, Germany) are added (100 μl beads/10⁸ lymphoma cells) and the suspension mixed gently at 10° C. After 15 min, the suspension is passed through a MACS separation column L (Miltenyi Biotec) under gravity at 4° C. in the presence of a strong magnetic field generated by a MidiMACS apparatus (Miltenyi Biotec). The column is washed three times with 3 ml of ice-cold PB to elute unbound cells, which are then pelleted and resuspended to 2×10⁷ cells/ml in ice-cold PB+0.02% azide (PBA). Cells that bind directly to MACS strepatavidin MicroBeads are depleted by this procedure.

[0254] An equal volume of biotinylated, fixed RhD^{+ve}-erythrocytes at 2×10⁶ cells/ml in ice-cold PBA is added to the depleted library cell suspension. The cell suspension is gently mixed for 30 min at 10° C. MACS streptavidin MicroBeads are added (10 μl per 10⁶ cells) and the cell/bead suspension gently mixed at 10° C. for 20 min. The cell suspension is then passed through a MACS separation column L under gravity at 4° C. as above. The column is washed three times with 3 ml of ice-cold PBA to elute unbound cells, removed from the MidiMACS apparatus, and the cells that were retained in the magnetic field by virtue of binding directly or indirectly to the MACS beads are eluted in 5 ml of ice-cold culture medium. These cells are washed 2 times with 5 ml of ice-cold culture medium and returned to culture at 5×10⁵ cells/ml with the addition of Ramos feeder cells if necessary. These cultures are enriched for clones that bind the RhD antigen.

[0255] (c) Testing for Enrichment of Anti-RhD Antigen Clones

[0256] Once the culture has re-grown to 10⁸ cells, half of the cells are removed from culture and treated with pepsin at pH 4 to release F(ab′)₂ fragments from the surface of the cells, and a dilution series of the pepsin supernatant is made in culture medium lacking sodium bicarbonate, but supplemented with 10 mM HEPES, pH 7.4. Bonifacino et al, supra. Monolayers of RhD^{+ve}-CHO cells and normal CHO cells are grown in 96-well plates. The monolayers are washed, then incubated for 30 min at 4° C. with the F(ab′)₂ dilution series. The monolayers are washed again and F(ab′)₂-binding quantified using anti-human light chain antibodies and standard ELISA techniques. The ELISA signal produced in the normal CHO cell plates is subtracted from the signal produced in the RhD^{+ve}-CHO cell plates. Successful enrichment by the selection procedure is indicated by an increase in the titre of anti-RhD F(ab′)₂ fragments/μg IgL chains compared to the unselected library or to the previous round of selection. The selection procedure is repeated until the rise in titre of anti-RhD F(ab′)2 fragments plateaus.

### Example 5

### Isolation of Individual RhD-Binding Clones

[0257] RhD^{+ve}-erythrocytes are directly labelled with FITC. Colligan et al., supra. Biotin-labelled RhD ve-erythrocytes are incubated in ice-cold PB with phycoerythrin (PE)-conjugated streptavidin (Caltag Laboratories, Burlingame, Calif., USA) for 20 min, and washed 3× with PB. 10⁷ cells from the pool of RhD-binding enriched library cells are mixed with 10⁷ FITC^{+ve}RhD^{+ve}-erythrocytes and 10⁸ PE^{+ve}RhD^{-ve}-erythrocytes in 1 ml ice-cold PB and incubated on ice for 30 min. Individual library cells that have bound to FITC^{+ve} erythrocytes, but not PE^{+ve} erythrocytes are purified by fluoresence-activated cell sorting (FACS), and deposited into 96-well culture plate wells containing sterile medium previously conditioned by growing Ramos cells up to a density of about 5×10⁵ cells per ml prior to being re-sterilized by 0.2 mm filtration.

[0258] Individual clones are grown to ≧2×10⁶ cells, and F(ab′)₂ fragments prepared from 10⁶ cells and titred as described in Example 4. Clones producing the highest titre F(ab′)₂ are expanded and frozen down as described in Example 3.

### Example 6

### Selecting Higher Affinity Anti-RhD Clones

[0259] Anti-RhD Ramos clones are maintained in culture at 2×10⁵ to 5×10⁶ cells/ml for 6 weeks to allow the rearranged immunoglobulin V regions to mutate. Sale et al., supra. Anti-RhD cells are purified by FACS as described in Example 5, except that the ratio of anti-RhD cells to RhD^{+ve}-erythrocytes during labeling of the anti-RhD cells is 20:1, and labeling performed on ice for only 5 minutes.

[0260] Alternatively, the cultured cells are labelled with FITC^{+ve}RhD^{+ve}-erythrocytes and PE^{+ve}RhD^{-ve}-erythrocytes as in Example 5, and are additionally labelled with APC-conjugated anti-human Igκ and APC-conjugated anti-human Igλ antibodies. Anti-RhD cells are purified by FACS as described in Example 5, but with additional selection for cells that exhibit the highest ratios of FITC:APC fluorescence.

[0261] After expanding sorted clones as described in Example 5, clones producing the highest titer of anti-RhD F(ab′)₂ₘ are expanded and frozen down as described in Example 3.

### Example 7

### Producing IgG Anti-RhD Clones by Inducing Isotype Switching

[0262] Selected anti-RhD clones are cultured at 2×10⁵ to 5×10⁶ cells/ml with recombinant human CD40L, IL4 and IL10 for 2 weeks. Cells that have switched isotype to IgG are identified and purified by FACS after staining with FITC-anti-human IgG antibodies. These cells are expanded as described in Example 5 and their expression of IgG anti-RhD antibodies confirmed.

### Example 8

### “Fixing” the Antibody Secreted by Selected Clones

[0263] The human Blimp-1 cDNA is amplified from multiple myeloma cDNA by PCR (using primers jo1289-CGG ATA TCG CTG CCC CCA AGT GTA ACT C (SEQ ID NO: 65), and jo1290-TAA AGC GGC CGC TTA CTT ATC GTC GTC ATC CTT GTA ATC AGG ATC CAT TGG TTC AAC TGT CTC (SEQ ID NO: 66)) and cloned into the plasmid pIRESbleo (Invitrogen) to produce plasmid pBlimp1-IRES-bleo (SEQ ID NO: 67).

[0264] The IgG^{+ve} anti-RhD clones selected in Example 7 are transfected with pBlimp1-IRES-bleo DNA and cells resistant to 2.5 mg/ml Zeocin™ (Invitrogen) are selected. Blimp-1 expression supresses expression of AICD and thus prevents further Ig gene mutation, and also increases levels of antibody secretion. Shaffer et al., Immunity 17:51-62 (2002). Zeocin™-resistant colonies are screened by ELISA for Ig secretion, and the colonies secreting the highest levels of Ig are selected.

### Example 9

### Producing Anti-RhD IgG Antibodies

[0265] Blimp-1^{+ve} IgG^{+ve} anti-RhD clones selected in Example 8 are grown in CellMax® hybridoma culture apparatus as recommended by the manufacturer (Spectrum Laboratories, Rancho Dominguez, Calif., USA) to produce culture supernatants containing secreted IgG, and the antibody is purified using HiTrap rProtein A columns as recommended by the manufacturer (Amersham Pharmacia Biotech). Clones that secrete sub-optimal amounts of IgG are fused to mouse NS0 cells using standard techniques to produce hybridomas. Bonifacino et al., supra. Hybridoma clones are screened for titers of secreted anti-RhD IgG1 using the ELISA described in Example 4. Alternatively, the VDJ_{H}- and VJ_{L}-rearrangements in lines isolated from the libraries are sub-cloned by PCR into antibody-expression vectors and stably introduced into COS cells.

[0266] Those skilled in the art will appreciate that the invention described herein is susceptible to variations and modifications other than those specifically described. It is to be understood that the invention includes all such variations and modifications. The invention also includes all of the steps, features, compositions and compounds referred to or indicated in this specification, individually or collectively, and any and all combinations of any two or more of said steps or features.

The application's sequence listing, which the Patent Office published only in electronic form, follows.

SEQUENCE LISTING (68 sequences)

SEQ ID NO: 1 - DNA, 6557 bp, Human
agagggcaaggagagagcagagaacacactttgccttctctttggtattgagtaatatcaaccaaattgcagacatctcaacactttggccaggcagcctgctgagcaaggtacctcagccagcatggcagcctctttcccacccaccttgggactcagttctgccccagatgaaattcagcacccacatattaaattttcagaatggaaatttaagctgttccgggtgagatcctttgaaaagacacctgaagaagctcaaaaggaaaagaaggattcctttgaggggaaaccctctctggagcaatctccagcagtcctggacaaggctgatggtcagaagccagtcccaactcagccattgttaaaagcccaccctaagttttcaaagaaatttcacgacaacgagaaagcaagaggcaaagcgatccatcaagccaaccttcgacatctctgccgcatctgtgggaattcttttagagctgatgagcacaacaggagatatccagtccatggtcctgtggatggtaaaaccctaggccttttacgaaagaaggaaaagagagctacttcctggccggacctcattgccaaggttttccggatcgatgtgaaggcagatgttgactcgatccaccccactgagttctgccataactgctggagcatcatgcacaggaagtttagcagtgccccatgtgaggtttacttcccgaggaacgtgaccatggagtggcacccccacacaccatcctgtgacatctgcaacactgcccgtcggggactcaagaggaagagtcttcagccaaacttgcagctcagcaaaaaactcaaaactgtgcttgaccaagcaagacaagcccgtcagcgcaagagaagagctcaggcaaggatcagcagcaaggatgtcatgaagaagatcgccaactgcagtaagatacatcttagtaccaagctccttgcagtggacttcccagagcactttgtgaaatccatctcctgccagatctgtgaacacattctggctgaccctgtggagaccaactgtaagcatgtcttttgccgggtctgcattctcagatgcctcaaagtcatgggcagctattgtccctcttgccgatatccatgcttccctactgacctggagagtccagtgaagtcctttctgagcgtcttgaattccctgatggtgaaatgtccagcaaaagagtgcaatgaggaggtcagtttggaaaaatataatcaccacatctcaagtcacaaggaatcaaaagagatttttgtgcacattaataaagggggccggccccgccaacatcttctgtcgctgactcggagagctcagaagcaccggctgagggagctcaagctgcaagtcaaagcctttgctgacaaagaagaaggtggagatgtgaagtccgtgtgcatgaccttgttcctgctggctctgagggcgaggaatgagcacaggcaagctgatgagctggaggccatcatgcagggaaagggctctggcctgcagccagctgtttgcttggccatccgtgtcaacaccttcctcagctgcagtcagtaccacaagatgtacaggactgtgaaagccatcacagggagacagatttttcagcctttgcatgcccttcggaatgctgagaaggtacttctgccaggctaccaccactttgagtggcagccacctctgaagaatgtgtcttccagcactgatgttggcattattgatgggctgtctggactatcatcctctgtggatgattacccagtggacaccattgcaaagaggttccgctatgattcagctttggtgtctgctttgatggacatggaagaagacatcttggaaggcatgagatcccaagaccttgatgattacctgaatggccccttcactgtggtggtgaaggagtcttgtgatggaatgggagacgtgagtgagaagcatgggagtgggcctgtagttccagaaaaggcagtccgtttttcattcacaatcatgaaaattactattgcccacagctctcagaatgtgaaagtatttgaagaagccaaacctaactctgaactgtgttgcaagccattgtgccttatgctggcagatgagtctgaccacgagacgctgactgccatcctgagtcctctcattgctgagagggaggccatgaagagcagtgaattaatgcttgagctgggaggcattctccggactttcaagttcatcttcaggggcaccggctatgatgaaaaacttgtgcgggaagtggaaggcctcgaggcttctggctcagtctacatttgtactctttgtgatgccacccgtctggaagcctctcaaaatcttgtcttccactctataaccagaagccatgctgagaacctggaacgttatgaggtctggcgttccaacccttaccatgagtctgtggaagaactgcgggatcgggtgaaaggggtctcagctaaacctttcattgagacagtcccttccatagatgcactccactgtgacattggcaatgcagctgagttctacaagatcttccagctagagataggggaagtgtataagaatcccaatgcttccaaagaggaaaggaaaaggtggcaggccacactggacaagcatctccggaagaagatgaacctcaaaccaatcatgaggatgaatggcaactttgccaggaagctcatgaccaaagagactgtggatgcagtttgtgagttaattccttccgaggagaggcacgaggctctgagggagctgatggatctttacctgaagatgaaaccagtatggcgatcatcatgccctgctaaagagtgcccagaatccctctgccagtacagtttcaattcacagcgttttgctgagctcctttctacgaagttcaagtataggtatgagggaaaaatcaccaattattttcacaaaaccctggcccatgttcctgaaattattgagagggatggctccattggggcatgggcaagtgagggaaatgagtctggtaacaaactgtttaggcgcttccggaaaatgaatgccaggcagtccaaatgctatgagatggaagatgtcctgaaacaccactggttgtacacctccaaatacctccagaagtttatgaatgctcataatgcattaaaaacctctgggtttaccatgaaccctcaggcaagcttaggggacccattaggcatagaggactctctggaaagccaagattcaatggaattttaagtagggcaaccacttatgagttggtttttgcaattgagtttccctctgggttgcattgagggcttctcctagcaccctttactgctgtgtatggggcttcaccatccaagaggtggtaggttggagtaagatgctacagatgctctcaagtcaggaatagaaactgatgagctgattgcttgaggcttttagtgagttccgaaaagcaacaggaaaaatcagttatctgaaagctcagtaactcagaacaggagtaactgcaggggaccagagatgagcaaagatctgtgtgtgttggggagctgtcatgtaaatcaaagccaaggttgtcaaagaacagccagtgaggccagaaattggtcttgtggttttcatttttttcccccttgattgattatattttgtattgagatatgataagtgccttctatttcatttttgaataattcttcatttttataattttacatatcttggcttgctatataagattcaaaagagctttttaaatttttctaataatatcttacatttgtacagcatgatgacctttacaaagtgctctcaatgcatttacccattcgttatataaatatgttacatcaggacaactttgagaaaatcagtccttttttatgtttaaattatgtatctattgtaaccttcagagtttaggaggtcatctgctgtcatggatttttcaataatgaatttagaatacacctgttagctacagttagttattaaatcttctgataatatatgtttacttagctatcagaagccaagtatgattctttatttttactttttcatttcaagaaatttagagtttccaaatttagagcttctgcatacagtcttaaagccacagaggcttgtaaaaatataggttagcttgatgtctaaaaatatatttcatgtcttactgaaacattttgccagactttctccaaatgaaacctgaatcaatttttctaaatctaggtttcatagagtcctctcctctgcaatgtgttattctttctataatgatcagtttactttcagtggattcagaattgtgtagcaggataaccttgtatttttccatccgctaagtttagatggagtccaaacgcagtacagcagaagagttaacatttacacagtgctttttaccactgtggaatgttttcacactcatttttccttacaacaattctgaggagtaggtgttgttattatctccatttgatgggggtttaatgatttgctcaaagtcatttaggggtaataaatacttggcttggaaatttaacacagtccttttgtctccaaagcccttcttctttccaccacaaattaatcactatgtttataaggtagtatcagaatttttttaggattcacaactaatcactatagcacatgaccttgggattacatttttatggggcaggggtaagcggcttttaaatcatttgtgtgctctggctcttttgatagaagaaagcaacacaaaagctccaaagggccccctaaccctcttgtggctccagttatttggaaactatgatctgcatccttaggaatctgggatttgccagttgctggcaatgtagagcaggcatggaattttatatgctagtgagtcataatgatatgttagtgttaattagtttttcttcctttgattttattggccataattgctactcttcatacacagtatatcaaagagcttgataatttagttgtcaaaagtgcatcggcgacattatctttaattgtatgtatttggtgcttcttcagggattgaactcagtatctttcattaaaaaacacagcagttttccttgctttttatatgcagaatatcaaagtcatttctaatttagttgtcaaaaacatatacatattttaacattagtttttttgaaaactcttggttttgtttttttggaaatgagtgggccactaagccacactttcccttcatcctgcttaatccttccagcatgtctctgcactaataaacagctaaattcacataatcatcctatttactgaagcatggtcatgctggtttatagattttttacccatttctactctttttctctattggtggcactgtaaatactttccagtattaaattatccttttctaacactgtaggaactattttgaatgcatgtgactaagagcatgatttatagcacaacctttccaataatcccttaatcagatcacattttgataaaccctgggaacatctggctgcaggaatttcaatatgtagaaacgctgcctatggttttttgcccttactgttgagactgcaatatcctagaccctagttttatactagagttttatttttagcaatgcctattgcaagtgcaattatatactccagggaaattcaccacactgaatcgagcatttgtgtgtgtatgtgtgaagtatatctgggacttcagaagtgcaatgtatttttctcctgtgaaacctgaatctacaagttttctgccaagccactcaggtgcattgcagggaccagtgataatggctgatgaaaattgatgattggtcagtgaggtcaaaaggagccttgggattaataaacatgcactgagaagcaagaggaggagaaaaagatgtctttttcttccaggtgaactggaatttagttttgcctcagatttttttcccacaagatacagaagaagataaagatttttttggttgagagtgtgggtcttgcattacatcaaacagagttcaaattccacacagataagaggcaggatatataagcgccagtggtagttgggaggaataaaccattatttggatgcaggtggtttttgattgcaaatatgtgtgtgtcttcagtgattgtatgacagatgatgtattcttttgatgttaaaagattttaagtaagagtagatacattgtacccattttacattttcttattttaactacagtaatctacataaatatacctcagaaatcatttttggtgattattttttgttttgtagaattgcacttcagtttattttcttacaaataaccttacattttgtttaatggcttccaagagcctttttttttttgtatttcagagaaaattcaggtaccaggatgcaatggatttatttgattcaggggacctgtatttccatgtcaaatgttttcaaataaaatgaaatatgagtttcaatactttttatattttaatatttccttaatattatggttattgtccgccattttgttgtatattgtaaataaagtttagattgt

SEQ ID NO: 2 - protein, 1043 aa, Human
MAASFPPTLGLSSAPDEIQHPHIKFSEWKFKLFRVRSFEKTPEEAQKEKKDSFEGKPSLEQSPAVLDKADGQKPVPTQPLLKAHPKFSKKFHDNEKARGKAIHQANLRHLCRICGNSFRADEHNRRYPVHGPVDGKTLGLLRKKEKRATSWPDLIAKVFRIDVKADVDSIHPTEFCHNCWSIMHRKFSSAPCEVYFPRNVTMEWHPHTPSCDICNTARRGLKRKSLQPNLQLSKKLKTVLDQARQARQRKRRAQARISSKDVMKKIANCSKIHLSTKLLAVDFPEHFVKSISCQICEHILADPVETNCKHVFCRVCILRCLKVMGSYCPSCRYPCFPTDLESPVKSFLSVLNSLMVKCPAKECNEEVSLEKYNHHISSHKESKEIFVHINKGGRPRQHLLSLTRRAQKHRLRELKLQVKAFADKEEGGDVKSVCMTLFLLALRARNEHRQADELEAIMQGKGSGLQPAVCLAIRVNTFLSCSQYHKMYRTVKAITGRQIFQPLHALRNAEKVLLPGYHHFEWQPPLKNVSSSTDVGIIDGLSGLSSSVDDYPVDTIAKRFRYDSALVSALMDMEEDILEGMRSQDLDDYLNGPFTVVVKESCDGMGDVSEKHGSGPVVPEKAVRFSFTIMKITIAHSSQNVKVFEEAKPNSELCCKPLCLMLADESDHETLTAILSPLIAEREAMKSSELMLELGGILRTFKFIFRGTGYDEKLVREVEGLEASGSVYICTLCDATRLEASQNLVFHSITRSHAENLERYEVWRSNPYHESVEELRDRVKGVSAKPFIETVPSIDALHCDIGNAAEFYKIFQLEIGEVYKNPNASKEERKRWQATLDKHLRKKMNLKPIMRMNGNFARKLMTKETVDAVCELIPSEERHEALRELMDLYLKMKPVWRSSCPAKECPESLCQYSFNSQRFAELLSTKFKYRYEGKITNYFHKTLAHVPEIIERDGSIGAWASEGNESGNKLFRRFRKMNARQSKCYEMEDVLKHHWLYTSKYLQKFMNAHNALKTSGFTMNPQASLGDPLGIEDSLESQDSMEF

SEQ ID NO: 3 - DNA, 2386 bp, Human
actctctttacagtcagccttctgcttgccacagtcatagtgggcagtcagtgaatcttccccaagtgctgacaattaatacctggtttagcggcaaagattcagagaggcgtgagcagcccctctggccttcagacaaaaatctacgtaccatcagaaactatgtctctgcagatggtaacagtcagtaataacatagccttaattcagccaggcttctcactgatgaattttgatggacaagttttcttctttggacaaaaaggctggcccaaaagatcctgccccactggagttttccatctggatgtaaagcataaccatgtcaaactgaagcctacaattttctctaaggattcctgctacctccctcctcttcgctacccagccacttgcacattcaaaggcagcttggagtctgaaaagcatcaatacatcatccatggagggaaaacaccaaacaatgaggtttcagataagatttatgtcatgtctattgtttgcaagaacaacaaaaaggttacttttcgctgcacagagaaagacttggtaggagatgttcctgaagccagatatggtcattccattaatgtggtgtacagccgagggaaaagtatgggtgttctctttggaggacgctcatacatgccttctacccacagaaccacagaaaaatggaatagtgtagctgactgcctgccctgtgttttcctggtggattttgaatttgggtgtgctacatcatacattcttccagaacttcaggatgggctatcttttcatgtctctattgccaaaaatgacaccatctatattttaggaggacattcacttgccaataatatccggcctgccaacctgtacagaataagggttgatcttcccctgggtagcccagctgtgaattgcacagtcttgccaggaggaatctctgtctccagtgcaatcctgactcaaactaacaatgatgaatttgttattgttggtggctatcagcttgaaaatcaaaaaagaatgatctgcaacatcatctctttagaggacaacaagatagaaattcgtgagatggagaccccagattggaccccagacattaagcacagcaagatatggtttggaagcaacatgggaaatggaactgtttttcttggcataccaggagacaataaacaagttgtttcagaaggattctatttctatatgttgaaatgtgctgaagatgatactaatgaagagcagacaacattcacaaacagtcaaacatcaacagaagatccaggggattccactccctttgaagactctgaagaattttgtttcagtgcagaagcaaatagttttgatggtgatgatgaatttgacacctataatgaagatgatgaagaagatgagtctgagacaggctactggattacatgctgccctacttgtgatgtggatatcaacacttgggtaccattctattcaactgagctcaacaaacccgccatgatctactgctctcatggggatgggcactgggtccatgctcagtgcatggatctggcagaacgcacactcatccatctgtcagcaggaagcaacaagtattactgcaatgagcatgtggagatagcaagagctctacacactccccaaagagtcctacccttaaaaaagcctccaatgaaatccctccgtaaaaaaggttctggaaaaatcttgactcctgccaagaaatcctttcttagaaggttgtttgattagttttgcaaaagcctttcagattcaggtgtatggaatttttgaatctatttttaaaatcataacattgattttaaaaatacatttttgtttatttaaaatgcctatgttttcttttagttacatgaattaagggccagaaaaaagtgtttataatgcaatgataaataaagtcattctagaccctatacattttgaaaatattttacccaaatactcaatttactaatttattcttcactgaggatttctgatctgattttttattcaacaaaccttaaacacccagaagcagtaataatcatcgaggtatgtttatatttattatataagtcttggtaacaaataacctataaagtgtttatgacaaatttagccaataaagaaattaacacccaaaagaattaaattgattattttgtgcaacataacaattcggcagttggccaaaacttaaaagcaagatctactacatcccacattagtgttctttatataccttcaagcaaccctttggattatgcccatgaacaagttagtttctcatagctttacagatgtagatataaatataaatatatgtatacatatagatagataatgttctccactgacacaaaagaagaaataaataatctacatc

SEQ ID NO: 4 - protein, 527 aa, Human
MSLQMVTVSNNIALIQPGFSLMNFDGQVFFFGQKGWPKRSCPTGVFHLDVKHNHVKLKPTIFSKDSCYLPPLRYPATCTFKGSLESEKHQYIIHGGKTPNNEVSDKIYVMSIVCKNNKKVTFRCTEKDLVGDVPEARYGHSINVVYSRGKSMGVLFGGRSYMPSTHRTTEKWNSVADCLPCVFLVDFEFGCATSYILPELQDGLSFHVSIAKNDTIYILGGHSLANNIRPANLYRIRVDLPLGSPAVNCTVLPGGISVSSAILTQTNNDEFVIVGGYQLENQKRMICNIISLEDNKIEIREMETPDWTPDIKHSKIWFGSNMGNGTVFLGIPGDNKQVVSEGFYFYMLKCAEDDTNEEQTTFTNSQTSTEDPGDSTPFEDSEEFCFSAEANSFDGDDEFDTYNEDDEEDESETGYWITCCPTCDVDINTWVPFYSTELNKPAMIYCSHGDGHWVHAQCMDLAERTLIHLSAGSNKYYCNEHVEIARALHTPQRVLPLKKPPMKSLRKKGSGKILTPAKKSFLRRLFD

SEQ ID NO: 5 - DNA, 1969 bp, Human
gtgagatgacatcaaaacccttcgtgtaggagggtggcagtctccctcccttctggagacaccaccagatgggccagccagaggcagcagcagcctgttcccatggatccaccacgagcgtcccacttgagccctcggaagaagagaccccggcagacgggtgccttgatggcctcctctcctcaagacatcaaatttcaagatttggtcgtcttcattttggagaagaaaatgggaaccacccgcagagcgttcctcatggagctggcccgcaggaaagggttcagggttgaaaatgagctcagtgattctgtcacccacattgtagcagagaacaactcgggttcggatgttctggagtggcttcaagcacagaaagtacaagtcagctcacaaccagagctcctcgatgtctcctggctgatcgaatgcataggagcagggaaaccggtggaaatgacaggaaaacaccagcttgttgtgagaagagactattcagatagcaccaacccaggccccccgaagactccaccaattgctgtacaaaagatctcccagtatgcgtgtcagagaagaaccactttaaacaactgtaaccagatattcacggatgcctttgatatactggctgaaaactgtgagtttagagaaaatgaagactcctgtgtgacatttatgagagcagcttctgtattgaaatctctgccattcacaatcatcagtatgaaggacacagaaggaattccctgcctggggtccaaggtgaagggtatcatagaggagattattgaagatggagaaagttctgaagttaaagctgtgttaaatgatgaacgatatcaatccttcaaactctttacttctgtatttggagtggggctgaagacttctgagaagtggttcaggatgggtttcagaactctgagtaaagtaaggtcggacaaaagcctgaaatttacacgaatgcagaaagcaggatttctgtattatgaagaccttgtcagctgtgtgaccagggcagaagcagaggccgtcagtgtgctggttaaagaggctgtctgggcatttcttccggatgctttcgtcaccatgacaggagggttccggaggggtaagaagatggggcatgatgtagattttttaattaccagcccaggatcaacagaggatgaagagcaacttttacagaaagtgatgaacttatgggaaaagaagggattacttttatattatgaccttgtggagtcaacatttgaaaagctcaggttgcctagcaggaaggttgatgctttggatcattttcaaaagtgctttctgattttcaaattgcctcgtcaaagagtggacagtgaccagtccagctggcaggaaggaaagacctggaaggccatccgtgtggatttagttctgtgcccctacgagcgtcgtgcctttgccctgttgggatggactggctcccggcagtttgagagagacctccggcgctatgccacacatgagcggaagatgattctggataaccatgctttatatgacaagaccaagaggatattcctcaaagcagaaagtgaagaagaaatttttgcgcatctgggattggattatattgaaccgtgggaaagaaatgcctaggaaagtgttgtcaacattttttcctattcttttcaagttaaataaattatgcttcatattagtaaaagatgccataggagagtttggggttatttaggtcttattgaaatgcagattgctactagaaataaataactttggaaacatgggaaggtgccactggtaatgggtaaggttctaataggccatgtttatgactgttgcatagaattcacaatgcatttttcaagagaaatgatgttgtcactggtggctcattcagggaagctcatcaaagcccactttgttcgcagtgtagctgaaatactgtctatctctaataaaaacaggaggaaac

SEQ ID NO: 6 - protein, 509 aa, Human
MDPPRASHLSPRKKRPRQTGALMASSPQDIKFQDLVVFILEKKMGTTRRAFLMELARRKGFRVENELSDSVTHIVAENNSGSDVLEWLQAQKVQVSSQPELLDVSWLIECIGAGKPVEMTGKHQLVVRRDYSDSTNPGPPKTPPIAVQKISQYACQRRTTLNNCNQIFTDAFDILAENCEFRENEDSCVTFMRAASVLKSLPFTIISMKDTEGIPCLGSKVKGIIEEIIEDGESSEVKAVLNDERYQSFKLFTSVFGVGLKTSEKWFRMGFRTLSKVRSDKSLKFTRMQKAGFLYYEDLVSCVTRAEAEAVSVLVKEAVWAFLPDAFVTMTGGFRRGKKMGHDVDFLITSPGSTEDEEQLLQKVMNLWEKKGLLLYYDLVESTFEKLRLPSRKVDALDHFQKCFLIFKLPRQRVDSDQSSWQEGKTWKAIRVDLVLCPYERRAFALLGWTGSRQFERDLRRYATHERKMILDNHALYDKTKRIFLKAESEEEIFAHLGLDYIEPWERNA

SEQ ID NO: 7 - DNA, 36 bp, Artificial Sequence
  Made in a laboratory from synthetic material
tcaaggtacctgcacttcccaagtgtccacttgtat

SEQ ID NO: 8 - DNA, 33 bp, Artificial Sequence
  Made in a laboratory from synthetic material
ggagggccctgactctcagaaagcacttcccat

SEQ ID NO: 9 - DNA, 29 bp, Artificial Sequence
  Made in a laboratory from synthetic material
ctcaggttgggtgcggccgctggagtaac

SEQ ID NO: 10 - DNA, 35 bp, Artificial Sequence
  Made in a laboratory from synthetic material
taaccgcggtctagataacagtcatcattggaaac

SEQ ID NO: 11 - DNA, 38 bp, Artificial Sequence
  Made in a laboratory from synthetic material
ccaatttacgtagtcctgtaatctccatcaaggattta

SEQ ID NO: 12 - DNA, 35 bp, Artificial Sequence
  Made in a laboratory from synthetic material
ggactacgtaaattggactgatcgtttttatgctg

SEQ ID NO: 13 - DNA, 36 bp, Artificial Sequence
  Made in a laboratory from synthetic material
gctgggcccgccaccatgagcgaaaaatacatcgtc

SEQ ID NO: 14 - DNA, 31 bp, Artificial Sequence
  Made in a laboratory from synthetic material
tgcctcgagttgaaaagattagcgaccggag

SEQ ID NO: 15 - DNA, 26 bp, Artificial Sequence
  Made in a laboratory from synthetic material
tccgtatacaacccatgcctggaagc

SEQ ID NO: 16 - DNA, 28 bp, Artificial Sequence
  Made in a laboratory from synthetic material
gatatcgataccagtagcacagcctctg

SEQ ID NO: 17 - DNA, 26 bp, Artificial Sequence
  Made in a laboratory from synthetic material
tccatcgataacccatgcctggaagc

SEQ ID NO: 18 - DNA, 27 bp, Artificial Sequence
  Made in a laboratory from synthetic material
ctggaattctgcaggacactcgaatgg

SEQ ID NO: 19 - DNA, 26 bp, Artificial Sequence
  Made in a laboratory from synthetic material
tccgaattcaacccatgcctggaagc

SEQ ID NO: 20 - DNA, 29 bp, Artificial Sequence
  Made in a laboratory from synthetic material
tgcggatccacctgactctccgactgtcc

SEQ ID NO: 21 - DNA, 26 bp, Artificial Sequence
  Made in a laboratory from synthetic material
tccggatccaacccatgcctggaagc

SEQ ID NO: 22 - DNA, 26 bp, Artificial Sequence
  Made in a laboratory from synthetic material
ctaactagttgggaccctctcagact

SEQ ID NO: 23 - DNA, 25 bp, Artificial Sequence
  Made in a laboratory from synthetic material
tccactagtaaccatgcctggaagc

SEQ ID NO: 24 - DNA, 28 bp, Artificial Sequence
  Made in a laboratory from synthetic material
ccatctagacagagaccttctgtctccg

SEQ ID NO: 25 - DNA, 26 bp, Artificial Sequence
  Made in a laboratory from synthetic material
tcctctagaaacccatgcctggaagc

SEQ ID NO: 26 - DNA, 32 bp, Artificial Sequence
  Made in a laboratory from synthetic material
tgaggcggccgcggcctcaattccagacacat

SEQ ID NO: 27 - DNA, 1063 bp, Artificial Sequence
  Made in a laboratory from synthetic material
aagcttggacacaagacaggcttgcgagatatgtttgagaataccactttatcccgcgtcagggagaggcagtgcgtaaaaagacgcggactcatgtgaaatactggtttttagtgcgccagatctctataatctcgcgcaacctattttcccctcgaacactttttaagccgtagataaacaggctgggacacttcacatgagcgaaaaatacatcgtcacctgggacatgttgcagatccatgcacgtaaactcgcaagccgactgatgccttctgaacaatggaaaggcattattgccgtaagccgtggcggtctggtaccgggtgcgttactggcgcgtgaactgggtattcgtcatgtcgataccgtttgtatttccagctacgatcacgacaaccagcgcgagcttaaagtgctgaaacgcgcagaaggcgatggcgaaggcttcatcgttattgatgacctggtggataccggtggtactgcggttgcgattcgtgaaatgtatccaaaagcgcactttgtcaccatcttcgcaaaaccggctggtcgtccgctggttgatgactatgttgttgatatcccgcaagatacctggattgaacagccgtgggatatgggcgtcgtattcgtcccgccaatctccggtcgctaatcttttcaacgcctggcactgccgggcgttgttctttttaacttcaggcgggttacaatagtttccagtaagtattctggaggctgcatccatgacacaggcaaacctgagcgaaaccctgttcaaaccccgctttaaacatcctgaaacctcgacgctagtccgccgctttaatcacggcgcacaaccgcctgtgcagtcggcccttgatggtaaaaccatccctcactggtatcgcatgattaaccgtctgatgtggatctggcgcggcattgacccacgcgaaatcctcgacgtccaggcacgtattgtgatgagcgatgccgaacgtaccgacgatgatttatacgatacggtgattggctaccgtggcggcaactggatttatgagtgggccccggatct

SEQ ID NO: 28 - protein, 152 aa, Escherichia Coli
MSEKYIVTWDMLQIHARKLASRLMPSEQWKGIIAVSRGGLVPGALLARELGIRHVDTVCISSYDHDNQRELKVLKRAEGDGEGFIVIDDLVDTGGTAVAIREMYPKAHFVTIFAKPAGRPLVDDYVVDIPQDTWIEQPWDMGVVFVPPISGR

SEQ ID NO: 29 - DNA, 3882 bp, Human
gtctctttctcatctggatcaagtctagagctatgaaatactaccctcatgaatatgcaaataacctgagatttactgaagtaaatacagatctgtcctgtgccctgagagcatcacccagcaaccacatctgtcctctagaggatcccctgagagctccgttcctcaccatggactggacctggaggatcctcttcttggtggcggcagccacaggtaagaggctcccgagtcccagagatgggaaagagattgagtccagtccagggatacctcatccacttctgtgctctctccacaggagcccagtccgtgaccaccatccctccacgtgagtcctcatcaccccctctctgactcctcttagggacactgtatttggagggtttttggggggtcagagtctaaagtcgacgaaaaagagccttcgatccgagacgcagtccgccctcccaaggccggccacaagtgtcgccaagggggagtgtcttccggccagtttagtgtgacgtctaatatgttcacgtggaggagtgtcgggggggtcgtgatgctggacaccgttgacttgaatgacttgattttgtagaccggcggcccacttccacaggcgaagggaccacagttagagtctcctcaggtaagagaggccgctctagggactttcttttccggtttggcctctgggtctctgaatgtgtcggtggtcgtcggcactaggtgaggggagtgggcggacgggcaaggggaggggtagtggggtgccttgaggatctgggagcctctgtggattcccactgacctttgaaaatgggactcacctcgggtgtgtctgatggagtccctgagcctgggggcattggtgagacccacatctggacgagatgcctgaacatgttaaggggtgtcagtgatggctgaggactgtgtctcaggagacgtgtctgagggactgcaagatcgctgcacagcagcaacctgtgaagtgcttctttttagaattgtgccatctgtcatcttttattcttcatgggctggaaagaggcgtgtcggagctgggcgcgttccagccaggagggactgtaagtcgtcgtgatgagagtaaatgggttgggggcaggggtagcccaatattggtgcctgccgtcgtgacagggacttagggagtcccctagacctcagtgccgtgaagctggtttcatgagaaaactaatgtttgtcttaggaggcatgcttcttgttaatagacaggatgtgtttgaagtggcttctgagaaaaaggggtaagaaaattgtgactaaaaaatgtgagagattttcaagtatattaattttttttactgtccaagtatttgaaattcttatcttttgattaacacccatgcagtgatttgtgtctggatttgagcgccacagcaagctcagctaagaaagaaatcctagcacagtgctgtcgggccccgatgcgggcactgcgttttgagcatcataaatcaacgtttatttttttaataaattgagcgatccttgaaccagatgatgaattagagtcaagatggctgcttgggggtctccggcacccacagcaggtggcaggaagcaggtcaccgcgagagtctattgtaggaaccgaaaaaacacaattggtaaatttatcacttctggttgtgaagaggtggttttgcccaggcccagagatctgaaagtgctctactgacagaaaaaacaaacacctggacaatttgcgtttctaaaataaggcgaggctgaccgaaactgaaaaggctttttttaactatctgaatttcatttccaatcttagcttatcagctgctagtttgtgcaaacaagcatatcaacttctaaactgcattcatttttaaagtaagatgtttaagaaattaaacagtcttagggagagtttatgactgtgctcaaaaagttttttaaattagcttgttatcccttcatgtgataattaatctcaaatactttttcgatacctcacagcattattttcataatgactgtgttcacaatcttttaggtactcgtttctcttgtgattaaggagaacactttgatatctgatagagtggccttcatttagtatttttcaagaccacttttcaacttactcactttaggatagttttaagtaaaatgtgcactattatcctaggtatttcaattaagcatgttagttgtgcataagagaaaactcaatcagagagtgctgaagacaggactgtggagacaccttagaaggacagattctgttccgaatcaccgatgcggcgtcagcaggactggctagcggaggctctgggagggtggctgcgcccggcctgggctttgggtctccccggactacccagagctgggatgcgtggcttctgctgccgggccgactggctgctcagccccagcccttgttaatggacttggaggaatgattccatcgcaaggctcgcagtgaccaggcgcccgacatggtaagagacaggcagcgcgctgctgcatttgcttctcttaaaattttgtatttgacgtcttatttccactagaaggggaactggtcttaattgtttgatgaagagcaggagactcatttatgtgagtcttttgagtgaccattgtctgggtcactcccatttaactttccctaaagcccatttgaaggagaggtcgacgactgctcacaacctctgaatggggatggcatggtaatgatgcttgagaacatacaatgcccactgcatcgccttgtctaagtcattgactgtaggtcatcatcgcaccttgaagtagccatgcttcaagcgatttatgataattgctccgtgaagtggaggctctgagcatctcaataccctcctcttggtgagaagatatgctgccacttctagatcaaggggacctgctcatttttatcgcagcacaggctcctaaattcttggtctcattctcaagatgttttaatgactttaaagcaacaaagaaatattccacccagtatgaggtgtaatgattgctaatgtttgaaccaaaacccaggtgggggtggggaggactgcagggaatggggtataagagagagagagacaaaagatgagaagccagcctgctgtgcaggaacccggcaatgagatggctttacgtgagacaagcaggtctggtgggctgaccatttctggccatgacaactccatccagctttcagaaatggactcagatgggcaaaagtgacctaaactgaccttagactaaacaaaactgaactgggctgagctgagctgaactgggttgagttgaactgggttgagctgagctgagttgagttgggctaagttgcaccaggtgagctgaggtgagctggccttgactgcataagctggctgagctggcagggtggctgagatgagttggctggctggctggctggctggctggctgagcggtctgagcgggctgataggctggctggctgagctggctgagctggctgagctggctgagacacgtgaagcactacacgaatcccagccaggatgtgactgtgccctgcccaggtgcagagggcaggctggggagtggggcggggccaccccgtcgtgccctgacactgcgcctgcacccgtgttccccacagggagccgccccttcactcacaccagagtggaccgcgggccgagccccaggaggtggtggtggacaggccaggaggggcgaggcgggggcacggggaagcatgtgctgaccagctcaggccatctctccactccagttccctcaactccacctaccccatctccctcaactccacctaccccatctccctcatgctgccacccccgactgtcactgcaccgaccggccctc

SEQ ID NO: 30 - DNA, 200000 bp, Human
aagcttaaatagtgttgcaagttttaatatgcctacttttcaatttttcaatactatttttactccaaagccatggtgacccacgctcgggtgggtcctgaggagaacaaagctctggttctgatcctaaccctaaccctgtcccaagactttgaccctgaacctaaatcctgatccctaccctggtccctaattctgacccttactttgaccctgactttgagcttgaccttgaccatgaccccacctctaaccatacttcccgccctgactctgaaccagatcctaatcctatccctaaccctattattatatttacaatctatgtctaatctaaccgtctagtgctaaatagctgtacccaaaggcacttttaaattatttaacttcttttccttgaattctctaaggacatcctaaaggagatgtcattatgtattttgcattccctctgagtggtatggcttcagatatgaacttctaatactttgcaagacataaaaagtttggagggtaacagcactgggttgttagggatgtatgttggcattcatggtagtcattggtgctgttctccaaatattttcagttcattttttatgaatgcattctgactcttccatcccacctacttaaattttctaatggccacatgagttttttttgttttgttttttttgccaatggaggtgagaagaaataacatgtgactttttcaggagaaatctccaagaaacagagttctattctgcatgcttttttctcttttctatagcaatggggatcttattgatggtccctccttccgtctggattcctgtgttaggatgacacagcacagagctacctctcacctgacccgtgatgagatgttttgtggcaacatgatctcaagataatgataattataaaaccctttactgacaaaatgtagatctccattttttcattgtaatttaactttgccttactttaagaacagtagtttgcagctccaaatgcactgattaaagacagacgtccattttctctggaaatgtatttttatgttcttactggatgtatttgctgttaatgtttgctactatgaagatacctgaacagtgtccacattagagaataagagaaagtaatgggcagattaaccctgtgcatctagacccgggaatcctttgaccctaccctccctgaaatggagacacagaggatggatgagaaaaactgagcagtgcacccatgatcacaaaaagaatgacatggaaatgtgcctcttcccatctcatgaaacgcagctcatcctctgttctttcaggcccttggtgaagagccaccccatgtctgtcccttcctcagtgtccacaccatgaggtctgcactgatctgggcttcccttctcatcactctcagtattagtgtgcattgtgaatcaggtccagctgtggctgctctgcatggggctgcagtcagtacgtttcctctgtgttcatgtaagtcctgttgaagcttactgatggagtcagagggggaaacattgtacagcccagcggttctcacagactctcctgcaaagcctctgatttcacttgtactggctacagcatgagcttggtccagcaggcttcatgacagggatttgtgtgggtggcaacagtgagttatcagggttactctccatgagtacaagtaaattaacagtcccaagcaacaccctttcaagtgcagtctaccttaaaatgaccaatgtgaaagccaaggacaagaccttgtattactgtgagtgacataggagcaggaacatctgcgtgagcccagacacaaaatcctctgcagggagacaggagggaatcgcatggtagatgctgattggaactaccatgtgtcgctcagaactaccaggaggtactcagaaccactagggggcgctcaggacaccaggggacgctcaggacaaccagggggtgttcaggacaccagggggtggtccgagccaccagggggcactcaggacaccaggggacgctcagaaccattaattccttgtaaatccatgatttttttacaaatgttacttccaaaacattaacttagaaccgggaattttttttttttgacaaagtctccctcttgtcgcacaggctggagtgcagtggcatgatcttggctcatggcaacctccaactcccgggttcaagcaattctcctgcctcatacttctgagtagctgccaccacgtgcctgccaccatgcctggctaatgtttgtacttttagtagagacggggtttcaccatgttgaccaggctagtctcgaattcatgacctcaggtgatctgccccgctaggcttcccaaagtgctgggattacaggcgtgagccaccatgcccagcctatttgaagttttaatgctgcgtgttttctgagtaacgctagcaatgatctgtcagaacaatttttaaaataggttatttatatattttattaaaatactattattaaaagagtaaaattgtaaaaattgcacctgcaatctcagcactttgggaggttgaggcaggcagatcacttgagctcaggagttttagaacagcctggcaacacaatgaaatcctttctatacaaaaaaaatagctgggtgtgatgctgcctgtggtcccagatacttggaaggctgaggtggggggatcccttaatcctgggaggttgaggctgtagtgagatgtgattgtaccactgcactccagcctggttgacagagtgagaccctgtcttaaaaaatgtgtatccttgatacacattgtttccatgaatagagtttagtgtttttgtgctgtgatactcaaacaattatatatgttttctaacattaactcaccatatgcatggtgttttgtttctttttctttcatcagctgaaagtggaatggaaattaaacaccactttaaaggctcttgttctccactttggttggctcctggtgtcctgtttttcagactatttctccatcttcccttttactttaaaagtcttttatcttcctcagtctccatgcaggaaataaaaattccctttactttctgtcctccaagtctggtgaacagtttccttctcttcataataactgaagccaaccaagtttaggaggataacagttctccttagaatatgctcatctacctgcagactctctgccctcctcacccttttctaaggtcctgcagacatcaccctcattccattccctcccttccctaagtacgacagagtgggctctgcagctcctgctgccttctgtgtgctcagccctggggctccctagtgcttttgttgcaggacgatcaaagatgggagagaccaaacagagttcaggagagtcctttattaaaaggtgatcacctggctcagttggactagcatccaggaaagtctgagccctggacaaagaaagcagccaccttttacacagtcagtggctgggagctacatgatgcaggaagcgtaattacagaacagagaacaaaggcagttatttgttacttcatgtcttacatccttgggaatacatggttctgtaacatatacttaacaatcttatgaccttgcagctgtgctggggaggtaagcaagaaccctctgagcctcaaggaatgtgaaaccaatgagaacagataaggctcactgagcacagaaggaaaaacaggcagttagtattctctaacttagactacgggggaggggctacacactacagtaagccctgaggggaaagttaattttctggctttacatattgtaaaattcataaattacttcttcactttgatgatgaagcccaaatccccatgtgcttacactctctcagaccaccctctaggaagctgccattgtgagtgagccctaaaaagcatgggctgggtttagcttcatattgctggatgttctctattataaaggcatgttggcaaataaagactacagtttgtattgaatattcatgccaaagaagtttttttcaaaacttttcaagtaaaaaattttatcttgcctagtttgaaaattaccatctaaattcaacaaataaggtaatacagttttaaaagtgatgcttgtcttattagttattcaatttattaacaacagactgatatttaaaataaataccattgcacatttaagtgccatactgttctgggattttttaaggaatcagagagaccgactctgttcaggaggatatttattatttaggttcaggaggatatttattatttaggtgcaccggccaagtcgaattaacatccaaaggactgagcccagaacagagttcagttaccttttaagcattttgtggggtgggagaggggacatctgtgcagggtgaagcatactacagaagtgagaaacaaagacagttattcaattgaaacatgtattacatcatttcttccttttcaaggaaaaacatgttttgcgacttgagtttatctttctagtgaccttgcagctacactgctagggaatcagggtcttcaaaatgcctgagaagggaggagaggtaaggctcattagccacagaaaaacaggcagttagtattttaaaggactccagctctttctctttttcagggagaattgggttttcttacatacaactgagtttctgcttacacattctttaatttcttttaattcctgtttcaatacttgacaagaatggcatttacatacagttttaccaaaacatgtatttaaatatatttgtctttttaatattggaataggcagacatacacgtagatcagcattattttgtactaaaatctcaaactgcaaacacaatttaaattcaattaaataattagaataatatgaaacaaatgggtgtgttgttttggtgtttacgtatgcattcacttttgcatgggcacatgtatgagtctttgctgggctgttgtgcacgtatgtgtgtttgtatgaccaggaggttttcaaatacatcattaaattacatagttatattaatcttggcaaggcacttgtattctgttttctttaattctgtttgcagaaagtagacacatattcagtcttagttccagtgtagggagtgcttttcatgagaaaaataccagaaaaaagggcaaacatggggcccactaatgtaaaaattagccacaatgtgtatgtgtgtgtgtgtgtgtgtgtgtgtgtgtctgagttgaatagtagagttggagtgggcttctatccacatgcacctgcgcctacaggtattatcaggtacaataatcaactgcagaaccctaaaggaaataagagtccccccaaacccctgaagagtgtttgggttcaccatgtgtccaatgattcagtgcctctcgagctccaggaaacggctccctggtgatgcgtgagatcttttcttggggtgtccctgcagagttcgctgggtttcctaaggctgattcactatttcaaaagatggtgtgagaagcatatggtgtaaataaagcagaattctgagccagggcacagccactttatactgggctagagacactggtaggaatatactctgtcagctcagatagaaacctccctgcagggtgggggcagggctgcagggggcgctcaggacacatcgagcacagtcttctgccccagagcaggtgcacatgaggctggggagaggttcctctcagggcctgggacttcctttaaaaatatctaaaataagtatttcacaaggactgctgatgtttgtataaatatcctattcaattgtgagcatttatcaaactggatgttgtaatgagaaccacttttataatggcgatttcaaactctgctagttatcttaataatagcagctggaggtcaggaagagattattacttataaataagtgcaatttttggagagacacactcattcccaaaataacacattcacatattaaggtctagaaatggttcacgttgcccctgagacattcaaatgtgggttcaaagtgaggtgctgtcctcggggagttgttccccagtggaggaagcgctatcaacacagagttcagggatgggtaggggatgcgtggcctctaacaggattacgactcgaaccctcagctcctataattgtgtcgtccgtgtgtcatggatttctctttctcatactgggtcaggaattggtctattaaatagcatccttcatgaatatgcaaataactgaggggaatatagtatctctgtaccctgaaagcatcacccaacaacaacatccctccttgggagaatcccctagagcacagctcctcaccatggactggacctggagcatcctcttcttggtggcagcagcaacaggtaaggggctccccagtctcggggttgaggcagaaaccaggccactcaagtgaggctttacccacccctgtgtcctctccacaggtacctactcccaggtgcagctggtgcagtctggccatgaggtgaagcagcctggggcctcagtgaaggtctcctgcaaggcttctggttacagtttcaccacctatggtatgaattgggtgccacaggcccctggacaagggcttgagtggatgggatggttcaacacctacactgggaacccaacatatgcccagggcttcacaggacggtttgtcttctccatggacacctctgccagcacagcatacctgcagatcagcagcctaaaggctgaggacatggccatgtattactgtgcgagatacaccatgtggaaacccacatcctgagagtgtcagaaatcctgatgtgggaggcagctgtgctgagctgaggcagtgatgcagcagtttccttaacttccatcttatctcattttgcatcgacatccacctttatattagccaagaatgtggaatagacgggtgctcataagagatccttaacttgcccattttaatgggttttccagaagatgtgagaagccactttgttagcaaagcatgccaaagccatgccctgctccagacacatgtgagcccatttcctgctctttgcttaactgacaagctctcatcagtgcacctgggctaatttcacatcaggtacaggaatatgttctaaaggaaagctaattttataatagcaattcctgcttaataaccttcagcttcattgtttttgtgtaatctatcaacaaattatgttagttcaaggttctcaatgggagtttctaataaatagaagggatgtatagaagttcccctaattaaaacaattgtgaacacaatcttggtattcagctgtgtctccacccttcttaccattcaccacaaagtaattctcacttctggaagctgggttcattttcaaattagttttttttttcattttaatatctcaaggttattgtatgtgactattttagcagaaattgaattttgggaaattgaactaaccaactgaaaataaattcacaactaaataacaagatgccagaatataattggctccaggctttgttaattcagcagtttatctacctaggcattatatttacacatcttcatgctatttttacagtcaactcccattatgtaagaaatggtcatacaccatttcttacatatggtaagatatctacgatggatattcagaactacgataaacattggatgcatccaggtttgtctgaactcactgagattattacactcagctgctgtttcaatgtgtctgaaggtataaatgacaattcgaatgacttgggtgtgtggatggttttacatgagtctttaagtgtagaacaatattgaccctgttccaaaatctgtccttgatccatgatcacactcatctcccagaacagctccttcaacacatttcctatctggatgaagaggactctgtgcttggtgaggggaggccacaggtagagaactgagttctcagagggcacagccagcatcctcctcccagggtgaacccgaaagactgcggcctccctcatcccttttcatctctccatacaaaggcaccacccacatgcaaatcctcacttaagcgcccacagggaaaccaccacacatttccttaaattcggcgttctgcttacacgggaaatgctttctgagagtcatggacctcgtgtgaaaagaacatgaaaaacctgtggttcttcctccccctggtggcagctcccagaagtgagtgtctccaggatgcagatatgaagatatgggaggctgcatctgagcccagggctcacagtgggtctctgtgttcacaggggtcctgtcccagtgcagctgcaggagtggggcccaggactggtgaagcttcggagaccctgtccctcacatgcgctgtctctggtgactccatcagcagtggtaactggtggagctggtccgccagtccccagggaaggggctggaatggattggatacatctattatagtgggaggagctactacaccccgtccctcaggagttgagtcaccatgtcaatagaaacgtccaagaaccagttttccctgaagctgagctctgtgaccgcagggaggcggagggggcgggcgcaggtgccgctcaggaccagcagggggcgcgcggggcccacagagcaggaggccgggtcaggagcaggtgcagggagggcggggcttcctcatctgctcagggctctccctcctcgccagcacctcagctgtctccagggctcctctttctttcttatctgtggttctgcttcctcacatccttgtggcaggcaagaaaggaggacgacaggcctggtgcggtggtgtatgcctgtaatccccgcactttgggaggccgaggcgggtggatcacctgacgtctggagttcgagaccagcctgaccaacatggagaaaccccgtctctactaaaagtacaaaattagccaggcgtggtggcgcatgcctgtaatcccagctactccggaggatgaggcaggagaacggcttgaacctggggggcggaggttgctgtgagccgagatcgtgccattgcactccagcctgggcaacaagagcaaaactccgtctaaaaaaaaataaaaggaagaagacaaattttcctcttacagtcgaagtatcaacaatactaggaactttcctacgagttcctgaatggccccttttttccttcttgattaaaaaaaagttctaatgcttctcaccatctctttatttgtgtcgtcaattgaattgtgccctctttgaaattcatatactgaaatcttgaatccagtggatctatattggaattttaagtatataattaaggttaaatgtggtcatacgtgtgagaccctaaagcaatagacatgttgtctttataagaagaggaagagacaccagagacctctcacttttcacgtgcacatagaaaggaggccatgtggacacacagtggactagaaggtggccctgggcaagccaggaagaagccgcaccaagaaccaccctgccagcaccgtgatcttggacattcagactgcagaattgtaagaaagtcagtatttgttgtttatgccacccactcctgttgtcttcttgtgaagacccacacagactaatactacataactctgttagctttgtctcctagaaggagaagcaggcccctgaggctgggcacatctcagatttccatataaagtaggcaaaaatagtaactcttataaaaaaatgtgtcaaggccctttctttcttttttttctttgagacagagtctcgctctgtcaccaggctggagtgcagtggcacgatctcggctcactacaacctccacctccagggttcaagtgattctccttcctcagcctcccaagtacctgggactacaggcacccgccaccaaccctggctaattttttgtatttttagtagagatggggtttcaccatgttagcaaggatggtctcgatctcctgacctcgtgatcctcccgcctcacctcccaaagtgctgggattacaggtgtgagccaccattggccatttttggtggaaaggtctctgaaaccaaccctggtgtctgtgccacaaaagttgtcttttatcttttatttggacataacaaatggacagtgagtaccacctggatggagactgaccactgaccatcttctgctgtctcctaagtatgtcaaagaaaaccacatcgacatcactatttttcttcaacctcctcgaatgaactatagaaatgatccctgaaagtatagtctattccttcaaccttctaaatttgcactaaatctcttcctaaatgagagctacagggggtctgagttttattcccttctttccagttttccccaagtacaaagagcagaatagactttcagtgaaatttggctgacaatgcccctaacaccacatcactttctaaaacccatatcctgcctccatccttctctggacacccctcatcgggctacccaggaatggccagaagctggcatcagcttctgggctgaggccacgagctatacacacatgtgatttcagttacacagactctactgcaggaccacacctgtgttctgaggcactcaggcacctgctgatctcagtcattctctaataaattacacacctcttattaataaaggtccaaatggtcccatcagctgcagagcagtggagtaaagctcatgggtgggtccgtcaggcagaagtcagacaatgggatgggtaggttggtcacctccattgtcactgaggttcccagtggattttaacagaataaaacaatattaacaacaaagggatcttgaaagtatttaaggtccaggaattttgtttggggggctagagaaagacatttttaaacagaaagccctaaagcacatacagcagctgacagagtggccactgtgcacatgacggctgaggagacagatggtaggggacattcccccaagatgtccctgggtgtgtgatggttggactcctcatgcatatgaaaataagagctggactcaggtagaaacaagggccataccccataggaaaggaagaaaaaaacagatgggcaaccctggagagagctcattagatttggtaggtttgagatgaaaattacttccatggattttaatgttctaagctaagtaagaatctcttcaataaagtgagaattaaaaggagaatggagctaggagttgagagaggcaacaaataatgagagagcagaaagcaaatccacaaaaaactgtcacatgacagaggccagaatggagctgatgcagctgcgtcatttcctacagacctagttgaccatgtggagaagaggcttgaacaaatggggacgttctccaaccttccaaatcagccttcttcttaggcttgagtagtaatcatggttctgagggtgaccttccaaattttcctgtctgtacctcttccaccaggggtagagtgtcttcccaaccataatggtttctctccagtgtcctcagcttctcctcctttgtacttaccctgcagattaaggatttcttctagatggagtttcctgggaatcctctgttttcttttgtttctgttgactccaccacaccccataggtcacaggtttgattggatttcccctggagacagtggaggtggatccaggcgttcaacagtcctcgctgttcttcccttcctgtcagcaccacaggacagcagataagggagttgactgtggatttttcaaattcctgggaaaagcctgcaaggactagtagattcacactctaataccattagcacatgcatccaaaaaaaatcctcactaaatatttccaggttagcctgttcctctctcaatgccatccagtggcacctgccctgggttcactaacatgtgggccccagtcctctctgcaggcctctctctcctcacatttcagtcttcttgctttctctgtgaaactaactcacaaatgttacaggtttttcttcttcctttattcacagtttttcaggtttgttgttaatgaggacagaataagatcatagtttcctcatttttcacattcccacactgagtagatttctatataaaagccagaaactaagagaacaaatcaaatatccatatccattacaggtgaatgttaaacaatttgacataagattatgaagtaaagtacaatgcagcattagaatcaaggcatcctcattcacataaagtcatggctacattcacaaataactgcgctgagtggaagtagctaaagtattaacagtgcacttcataaacttctatttgtataaactgtagaaggtaaaactattctaaagtaacagagaagagaatttggtgagaattgggtgttgaaagtaatggggtgttgagatgaaattacagagaagtgacagaaagatttagaggttaacttaattgcacacgacttaattgaaaccctgattaaagggttgcacacatacattaacatattccaaattgtgcagtatatatttgaattaattatttgttaattttgtacttaaaaaagcagtaacaaagaaacaaatgaatgtgttggttgaggaggagcaaaaaatagatggctattaacacttgaaacatcgctgacttttgaaagtacacatgtatgaacactggttctctctatatatatttcagataaacaacagaatacactaaaagaaaacagagatatcctggcaggggtggaatcctgcaaacctcactaggcatgtcccacactgccctggagttgtctcaggggagcagtcttctctagtggtcagaggcacaggcatggataatgggactaattctgtccagctgtgtgatcttgaccatattgtacagccactctgttctgtgtgtaatgtaaattccttaaaatgtaacattgacacttgcattaaatgtattctgcaaatatgtagaaatgaaataagatgatgactgctaaatagttatcaaggcatgatcacataatataaaatgatattttcctgagtgataagatgactaccaatctcccccaaggcactttgtctgctctgacccctgcccctcctcaggattcccatcccagagcttgctatacagtaggagacatgcaaacaggtttctccctttgttgatgaaaaccagcccagtcctgaccccgtaggtttgggagagaagccccagccctgggattcccaggggtttccgttttgtgatcaggactaaagacagaggacccatcatggagtctgggctgagctgggtttcacagttgttattttaaaaggtaaaccagagaaatagagtgtgagtgaatatatttgagagaaacagtggatatgtcaggcagtttctcaccaggatctctacgagtttacgggtgtccagtgtgaggtacagctggtggagtctggagaggacccaagacaacctgggttccctgagactctcctgtgcagcctctggattaaccttcagtagctactgaatgagctcggtttcccaggctccagggaaggggctggagtgagtagtagatatacagtgtgatggaagtcagatatgttatgcacaatctgtgacgagcagattcaccgtctccaaagaaaatgccaagaactcactgtatttgcaaatgaacagtctgagagcagagggcacagctgtgtgttactgtatgtgaggcaccaggtaagaagacatcagtgtgaacacagacacagaggttcctgtaatgataagggaggaggctgggataaagggagcactcaagacccacagaaaacaggggaagctctagggcaggtgcagacggtcgtcatgggctactttccttcagggtctgtggctttctctgcatccaacagttcccctgggagcctcttgacatttatgtttctgtgcccatccctgaggtctctggattagaaaaatttattataagaagtggaaacattctcatttgtcccaaaggcagatgtaagtaatggaggcataaaaatgcacaggaggccagggaggctgtagacactgccaccccagaatgtcaatctcaccactagtgctggagaagagtgggagtttgatggagcttacctaaataccctgggtccaagctaagttcagcgaggccactggtgcctcccagagctcagttgtccatcaggaatctcccatgtgtcccagcagcagccatgcctcagtacttccgctgtgcacagccattgtctgggaggagctcccaggttgggtgtctttggcacacaccaggtgacaggtgttagagtgcagtgcagcagctggctgcctggtctattgggctccctgatgttggagagatgggaggtggattctcagggccagcacccagtttgtgaatttttatataaaaaccatgattttacttcattttctcagatgacatagataattaagaacagagtctggtccggacgtggtggctgatgcctgtaatcccagcactttgggaggccaaggcgggcagatcacctgaggtcgagagttcgagaccagcctgaccaatatggaaaaatccatgtctactaacaatacaaaattagccaggcatggtagcatatgcctgtaatcccagctactagggaggctgaggcaggagaatcgcttgaacccgggaggtgaaggttgtggtgagccaagatcacaccattacactccagcctgggcaacaagagagagaatccatcaaaaaaaaaaacaacaaaaaaaaacagactttgcaaaataatgttcaaccttatcccaaattcattgtttcttaattctgtgcagcatccagacatattattaccttcctcatgatgaattgttctgtttaaactgagatcagttttttctcatattctttggtttctgtctaagaacagagatcttgattacagtaaggttggttctttcctcatactaaccctcacctcccccagagaaagagcagagattgtcctcactctgagtctgagggaggagctgttcctgtacaactcagagcctgcagagacccccaggtgcagcttcagtgagtcagacatttctccatgtgggtgacctccactgccagtgattgctgctgaggtctaattgtgggttaataattaggacacccttcaggttgtcacatcccaatcctattctgaacatcaccattatcatagacagagatagttcaatgcccattctactgacataagtttctctttataatttggttccaactatggagaaaaacgtgaccctatatttgtctgaatctaacctcagaatctgctgcattgctctaggagattcacaaattgaacacaagtgagctgtttattctcataaaaatgtacatatttgagaatttcaatgtattgcccagaacctgtgcatgccaacaactgtgtttctcagcgcactcttggcctggtgaagccctcacagaccctctcccttacctgcgctgtgtctgtgttccccgtgataacgaggtcttcctgctgaagctggatccatcagccccccagggaagggaatggagtggattgggtgcataggtcatgaagggagcacacattaccacccactcctcaagtgtccagtcaccatccccagatccgtgtccaaaaaagcagttcttcctacagctgagctacatgagcaacaagcacatagccatgtatttttaagccaaagacacagtgagggaatcacagtgtgagctcacacccaaacctccctgtgggggtgcataggacagaaggggttgctcaggtccccagggggctctcaggacaccaaggggcactcaagaccattgtagaggcacgcaggtcagccgggggctctcaggaaccatcgaggaaaatcaggacaccagagggtgctcggtacagcagggggctcaggaccattgtgaggactcagaaagagcaggttcaaggctcagccttagggcaggtgaagctgggatgaaaaggggctggatgaggggttttgtgtcaccatcatatttcaccactagacaccctccactacatctgttctaatgcatgttctaacacatgtgagtgtttgtatgactagaaaatgatattttggggccaggtgcagtgactcatgcctgtaatcccagcactttgggaggctgaggcgggcagatcacctgaggtcaggagttcaagactagcctggccaacatgatgaaactccgtttctactaaaaatacaaatattagccaggcccagtggcacacgcctgtaatcccagctactcgggaggctgaggcaggagaatcgcttgaacctgggaggcagaggttgcgttgagccaagatgtgccactgcactccagcctgggcaacagagcaagactccattaaaaaaaagagagaaaaaaagaaaatgatatttatatcaatatataaccatagctaggtgtgtcaagttgtcctctccatctatgtcagccttgtccataaggactaattccctgtaatttcttgaggacctcataaactgtggtcaattatgtaatattcctctcttttttctgccttccttcctgccttctctctctcacacagaaactgacgtacacccaccccacaacacacataaatctataccttttattacctgatgtatttaataaacttgattaatgtgcagcttttcaagcttagttgcttgtgaggttgtaagaataagaaccattttttcaaagggaatgcttccagtttttgcccattcagtatgatattggctgtgggtttgtcatagatagctcttattattttgaaatacgtcccatcgatacttaatttattgagagtttttagcatgaagggttgttgaattttgtcaaaggctttttctgcatctattgagataatcatgtggtttttgtctttggctttgtttatatgctggattacatttattgatttgcgtatattgaaccagccttgcatcccagggatgaagcccacttgatcctggtggataagtttttgatgtgctgctggattcgttttgccagtattttattgaggttttttgcatcaatgttcatttgacaaagggctaatatccagaatttacaatgaactccaacaaatttacaaggaaaaaaaaacaaccccatcaaaaagtgggcgaaggacatgaacagacacttctcaaaagaagacatttatgcagccaaaaaacacatgaaaaaatgctcatcatcactggccatcagagaaatgcaaatcaaaaccacaatgagataccatctcacaccagttagaatggcaatcattaaaaagttaggaaacaacaggtgctggagaggatgtggagaaataggaacatttttacactgttggtgggactgtaaactagttcaaccattatggaagtcagtgtggcaattcctcagggatctggaactggaaataccatttgacccagccatcccattactgggtatatacccaaaggactataaatcatgctgctataaagacacatgcacacgtatgttatattgcggcattattcacaatagcaagacttggaaccaacccaaatgtccaaaaatgatagactggattaagaaaatgtggcacatatacaccatggaatactatgcagccataaaaaatgatgagttcatgtcctttgtagggacatgggtgaaattggaaatcatcattctcagtaaactatcgcaagaacaaaaaaccaaacaccgcatattctccctcataggtgggaattgaacaatgagatcacatggacacaggaaggggaatatcacactctggggactgttgtggggtggggggaggggggagagatagcatcgggagatatacctaatgctagatgacgagttagtgggtgcagcacaccagcatggcacatgtatacatatgtaactaacctgcacaatgtgcacatgtaccctaaaacttaaagtataataaacaaaaaaagaaaggtgagggagatactgtgagtaaagagctcgcttggggtctgcaatgtagtatggcttagtcagtgtgttagtgctctgtcctcttctttctgaaatcacagttcaccatcacctccttattttctagaaacacctggaaatagtgaaacttttttacttcccttatatttcatattagtgctatacccagggatcatcagttaaccacaatgacagtgacaaaaagctgccttcatattttctcccaggagaattttggctccaagaatcaaggctttaataggattcaggagaagtcagtgatcacagggcagatgcctcaggtttaaagtcacatcaaaccgagtgtgaaccttctgtaactcgcaactgtgctaacttttggaggtttcttgaaaaattctagtcagtttgggttaaagaatggtttcagtaatgtcacactcagggtcatgactgctcaactggtcattagccctgggaagtaacttccgctaacattggcttacctcataggagcttataaattgccatcatattgattatctcattaggtcatcaggatcctgagagaatgatcttttaagaaaacaatctttttatcaggcttatttatcattgcttctatatgctgctcttgtcctgcagaggaggcagcctggggtcaatcaagatactgggtatttgggttcatactttaagccccccactctctcatggtctaacttcagacaagtcacctctgctttttgagcttcacttttctcagccaccaaatggatgtagagataatatttgcttgcccaattttgaaatgtaggacggggcatcattaattaattagttcttttgtccacaaacatttacccagctccagcatgagcccagcctatgcttggtcttctgcagaacagagaaatgccttagaaggagattctgactctagtcatccacgctgtagttaaagaactgtgagctgggagggtggggcaggcgagggggccttctgatatttatgtctcatctttccctgaaaaaatactgtgtttctactttgctgcttgtattcattcccaacctattactgttcataaaatgcataaggtttactttgactccaagtttatttttattaattaaaatattccatgtttatcataatgagggtgattctcattaaaactcttttcattgccttcctgactaaaagcaagtacatttttattttaataaacataagtaacacaataaaaaaaaaagaaccatgtgtttcccagctgtgtacctctctaagctgagtagcatcagcttataatacccagcatgaaaaacaactcaaatgtcagtcatcagcttaattggtaaagaaattgaggaaaactcatccattggcatattacccactactacaagcaactaatgttggctactgtcaacagcatggcaaaattcacaagtagttctcataagtaaaatgagccaaacaaataaaagtacttacataagatacaacttttataaatttcataaaatgaaaagtaatctaaacttacacaaaaatcagtagctcactgtgaatattgtaggaaaagggaaggtctaggaaggagaaattacagaacaagagaaaattttaaggaaattgacttgttatctacgttgataatgattatgtttgggacaatattagtaaaattgaacacttcataaagatattttttaatttaacctaattaaagatagcactaattataacatgtattatttggtagaaaaggagttagacagagataaataaaatacatgaaatgtcagagacacctgaaatacacagcaacgagccctaggcatctctgtatttttagagaaacattagaatacagcaaaataatggactaattctacgacattaagaaagtttatcaaacccaccaggcatgttgtattagttcatcttcacactcctataaagaactacgtgagactgggtagtttatgaaaaaagaggtttagttgactcacagttctgcacagctggggaagtcacaggaaacttacaatcatggtggaaggtgaaggggaagcaaggcacgtctcagatggcagcaggtgagagagagagagagagaagtgacatacacttttaaaccctcaggtcttgtgagaactcactatcatgagaacaacatggggaagctgcccccgtgatccaatcacctctcacttggtccctcccttgacatgtggggattacaatttgagatgatatttaggtggggacacaaagccaatgcatatcatatgtccagctctatcctggagttgtttcaggaatccagtgtgtcctgttgatagaaaccgtgacactgagctcacagcatcagtagtatttgacaccatgcaaagtcaagagatctcaactgagatttagtgtggatgttttgtctgatgaagtcgtacactcagagcaagtgaatatggagaggtttattatctgcactgtagaggtgtctgctgagagcagggcagttctctcaggactgtctaaaatggcttggtaaaggaggaatggagactgactcagggtttttataatggtttggtggtgggggcagagtgaggcttcccactcacagaaaggggtttatagggtttgaaactcccaatggcatcacatgaagaagctcctgtgattgcaaactagattcaccttgtttgacaaaagaggagatgatagaggagtgagccttaagtcctcagcagtcatgcatcaaaaatattgtgacaacttattctatgtagcaagaataaaaataatgaataagcaaaaagataagggttcaatgcaggtggacaacatggaggtctacaggaatgcaatgactttataaatataagcaaataatattgagaaaaaggaggaggggttggggaattagagaggggtcctggtctaatgtcttgggtagaagcttctcacaacaaaggactatcagcttattctgcaggtcttaggccagctatctgcttaaaaacatccaaaaccccagagaatctataaggatgctcagtttaatatctcctatttgagtagctttacagttgtgtggaattctttattgattcttttttatttgtttttagagacaggctctcaccctgttgcacagtttgaagaacagttgtatgatcaaagctcactgtaattttgaacacctggctcacataatcttcccatctttgcttcctgagtatctagaagtagaggggaacgccacccctcacctgcttattctttaaaatattttttcagagaaatagcatctctttatgttgctcaggttggcttcgattgcctcgtctcacgggatttccctcatttttgcttctgaaagtggtgtgattatagcgatgatccactgcatctggcctgaatttattctttagttgtaaaacatgaacccaacaattaactgcctgaatattttctgcagcgagttagttaaaagtatctgataagattccttccaatatgattcaagaggagtattttctgctgatgttccttccaatttccttgctgaagatcacaagagtctgtggaaaagatgtaacaaaaaggcagcctcaaactcttcatgattggagtggatatcacacaggaatcactttcagtattttgtaacacatgcatgcaataggacaaagatgatctctgggggtaaactctataaacgtatgggccttttagctgccaagtcatagggtaataactgatgcaccctgaggagtggaacatgattccatagtgctagtgggagaacctttggccaagggagttttacattttattaaagatttgatcatttttatgtagagatgccatttttaaaacattcctagaagattgttgagtaggattcattctgtcttatatgaacaatgataatgctctccatggttagataatattataaactagattgagctagagcgtttggtgtatttaatcactttttttagcttccattagcatttggattaaatgaaaatcataacaaacagtctctcagaccacagtgcgatcaaattagaactcagaattaagaaactcattcaaaaccacacaactacatggaaactgaacaacctgcttctgaatgactactgggtaaataatgaaattaaggcagaaataaacaagttctttgaaaccaatgagaacaaagacacaacataccagaatctctcggacacagctaaagcagtgtttagagggaaacttataggactaaatgctcatgagagaaagcaagaaagatctgaaatcgacaccctaacatcacagttaatagaactagagaagcaagagcaaaccaattcaaaaactagcagaagacaagaaataacgaagatcagagcagaactgaaggagatagagacaggaaaaacccttcaaaaatcaatgaatccaggagatagttttttgaaaagattaacaaaatagatagactgctagccatactaataaagaagaaatgagagaagaatcaaatggacacaataaaaaaatgataaagaggacatcaccactgatcccactgaaatacaaactaccatcagggaatactataaacacctctatgcatataaactagaaaatctagaagaaatggataaatttttggacacatacaccctcccaagactaaaccaggaagaaatagaatccctgaatagatgaataacaagttctgaaattaagtcagtaattaataatagcctactaataatattattaatagtaattaataatagccaactaaaaaaagaccactaccaggtggattcacagctgaattctaccaggggtacaaagaggagctggtaccattcctcctgaaactattcctaacaatagaaaaagagggactcctccctaactcattttatgaggccagcatcaccctgataccaaaacctgtcagagacacaacaaaaaaagaaaatttcaggccaatatccctgaagaacatcgatgcaaaaatcctcaataaaatactggcaaaccgaacccagaagcacatcaaaaagctcatccaacaggatcaagtcggcttcatccctgggatacaagggtggtttgacatatgcaaaacaataaacataatccatcacgtaaacagaaccaatgacaaaaaccacatgattatctcaatagatgcagaaaaggcctttgataaaatccaacaccacttcatgctaaaacctctgaataaaccaggtattgatggaaagtatctcaaaataataagagctatttatgacaaacccacagccaatatcatactgaacaggcaaaagctggaagcattccctttgaaaactggcacaagacaagggtgctctctctcaccactcctattcaacatagtattggaagttctggccagggcaatcaggcaagagaaagaaataaagggtactcaaaataggaaaagaggaagtcatattgtctctgtttgcagatgacatgattttatatttagaaaaccccatcgtctcagcccaaaaactccttaagctgataagcaacttcagcaaagtcccaggatataaagtcaatgtgcaaaaatcacaagcattcctatacaccaataatagacaaaaagagagccaaatcatgagtgaactcccattcaaaattgctacaaagagaataaaatacctgggaatacaacttacaagggatgtgaagaaccccttcaaggagaactacaaaccactgctcaacaaaataagagaggacatgaacaaatggaaaaacattccatgctcatgaataggaagaatcaatattgccaaatggccatacggcccaaagtaatttatagattcaatgctattcccatcaagctaccattgacttccttcacagaattaggaaaagctacttaaatttcatatgggaccaaaaaagatcccgtatagccaagacaatcctgagcaaaaagaacaaaactggaggcatcacgctacctgacttcaaactatactacaaggctacagtaaccaaaacagcatggtacttgtaccaaaacagacatatagaccaatagaacagaacagaggcctcagaaataacatcacacagctacaaccatctgatctttgaaaaacctgacaaaaacagcaatggggaaaggattccctattttataaacagtgctgggaaaactggctagccatatgtagaaagttaaaactggatcccttccttagaccttatataaaaattaactcaagatggattaaagacttaaacataagacctaaaaccatacaaaccctagaagaaaacctaggcagtaccattcaggacataggcatgggcaaagacttcatgactaaaacatcaaaggcaatggcaacaaaagccaaaattgacaaatgggatctaattaaactaaggagcttctgcacagcaaaagaaactaccatcagagtgaacaggcaacctacagactgggagaatgtttgtgcaatctatctatctgacaaaagggctaatatccagaatctacaaagaacttaaatttacaaggaaaagacaaacaatcccatcaaaaagtgggcgaaacatatgaacacttgcttctcaaaagaagacacatgaaaaaaaaagctcatccttactggtcattagaggaatgcaaatcaaaaccacaatgagataccatctcacaccagttagaatggccatcattaaaaagtcaggaaacaacagatgctggaaaggatgtggagaaataggaacgcttttacactgttggtgggagtgtaaattggttcaactattgtggaagacagtgtggcgattcctcaagcatcaagaaccagaaattccatttgacccagcaatcccattactgggtatatcagcaaaggattataaatcattctactgtgtcttacgtgacacatgaacacatatgtttattgcagcactgttcataattgcaaagacttggaaacaacccttatgcccatcagtgatagactggataaagaaaatgtggaaaatatacaccatggaatactctgcagccataaaaaggatgagttcatgtcattttcagggacatggataaagctggaaaccgtcattctcagcaaactaacacaagaacagaaaatcaaacactgtatgttctcactcaaaagtgggaattgaacaatgagaacacatggacacagggaggggaacatcacacacaggggcctgtcacggggtggggaagctaggggagggatagcattaggagaaataccaaatgtagatgatgggttgatgagtgcagcaaaccaccatggcacatatatacctatgtaacaaacctgtacattctgcacatgtatcccataacttaaagtataataaaaaatagtaactcaaaaaattatgttaatcagttctctagtaggtagaaattcatctgggagtttcttctcttgtccattttgataggatctgcagaagacataagaaccctctctgttaaaaatattcctaagttgtacaccatctagaaacatatatacttaattataatttttaatttattaaaaagctttaataagtgcaatgttttctgccttctgagttgatttcataacacatagaaggatatatcctgaatgaaactttgtactagtaatacaaattaaaggttaataacctctacttttattattgaggtattacccaccaatatataatcttaaatcagtgctctcaatggggcttttacctaaataatataaaaaatattttcctgatcttgacacaaaatagatgtgaacacattcttcatattcagccatgtctcctgtctattacattatgaaccacatgctaactttgatttacttgggacttgttctaatttcaaactagttattttttatcttcatgcagctagattattatgtgtgagtattttatcagagagtgataaagataatttaaacaagtaattgtgtgtctcaggactcttcttgggttctgagacaagaaatgccattactacctgaaggattgagacaactttgaaaatgtcagaggaatcatctctaattgcttctaaatttcagttttatcaattcttatgctttctgaattatttttgattttagttattaaaggattctttctttttctcttaatctagctaagaatttgtccttttttaagaaaaaactcttaggtttgttgatttttctattgcttgtaaagtcttttttcacttatttcatttactctaaagcctcataaacacattggtgacaggtagatggagaacttgattgtaaatgccctgtttttgttagacccagctgatcatgtcaggaagccccctgaggggtctaggagctgactgtggctcccaccactggacaaggatgagaacctccatgctttggggatgggaggacatgcagggcagtgtgaggggaggagggttgctggcaggtccagcattgcttcccctggctgcaccactcatgtccttcctcactcagagattcagtcatttcttcccaggtggaaaaatcagttaactttatctttgatatatggatgggagcccaagatagaggcttgtcagtcattatttctgtgcctgctgccttgggaatgtctgaatttctcatgctctgtcctgggtctataccccagtggctcccctactccatggcacccacctgtgcctgtgcatggcccctgatcacagcctccgtgaaacatctggtttggctcaggaagaaccctccctgccttgttttcctgctgtccctggtccacatccttctccatccacaggctctcagtggtgcctcccatccacactgaccctacgtgggttcatatcttgtccaccacttcctctctcttttcttctgcatcttgctttttattccaacagcctgtttccacctcacctggacttatgtacaggaaagtgtttactgagcaggcttgtgttgtgcaaaccctgaagattactgaaaaagtgctttctcaagccacatccatattcagctcctgggagatgatatctgcttttttggcatactcctcctggaaatatttttaaaccattttattaaggtaaggattacatctataagactatacgttatttaacatacttaattcattgagttaagtatgcaaagttaccatcaccatcaaggtcataaacatagcaatgacttccaaaacattcctctttattctttttattcttagtattatgattattattattagttgaaatgtatttttgcttgtgtgtctctgtctctgtgtgtgtagcctgggtgcacactatgctagctgtttccataatgacttatggggaatgcctattattgctgaaggggccagcgtctgagcactggaggtcagttatgcaggtgccacacacatctgtgatgggccccaataaacagcactgggcaccagcactcaggtgagcttccctggtggacaatgcttcacacgtattgtcatgcatcactgctgggagaactggggacaagagacttctcagggaaagaacacctgggagcttgtgcctggattctcagggccttcccactggttcctttgctcattttaattcatattcatttgctataataaagctgcacccacgagaataacagcttgtcttgagtcctttatttgtactgattatggggcctgaggatggtcttgggacactcaacacaattacatcagaggtgtaaattgctagaaagaccctgactactgacacatgtctatagcatttataatatcaaaggatgagaaagtgtaggataaaagacattcagtgcctggatggctatagaatcacatggcatgagatgatgtgtgcactccaataaggagcaggaagtgaaagtaatccatggaatttagaaacgacggacacagctccctaggagttgttccctgaacaagaacaagtaaaaataatgaagaacaacctgagtatgcaactcatatctgtgatagctaaaataatagtaaaaagatgcacatccagccctgcagtgtgccctgtgagccaaggctgctagactcccattcactgccaaagggtacagttgtccagaaacaacacacaacacacaagagctacacagatggtagcccagggtttggactggggaggggaatccacttgacaactagaacagggaggatagtgtggaaagtggcatcattttgtgatatgaatgatatcattaatagatatcatcagatcgtgaacaacattagccaatggactaggagactgactgatgtagcagattctctttggcttcatgtgttgcataagggaggagcatgtttgggaagatgctggacccacagctcacaatagacacatcacagatggctctagctgatcccaacctcaagtaggatgcttctgatgggacagctttcctcaagcactggatcccgatcatgtaaagtttctctaccctgagaatgagactgccctttctctctttaaaatgcaaagtgggctctccagatgaggagcccaatgctgtatatggaagccatagtgctatgtgtttatgttgataccgacggtcattgcttagcatgcatcttatccaggtcctgctgctgtgtgtttctgttgatgctgctggacattgcttcgcatgcaccttacctaggtcatggcctgtgctgtgataaagagaagtccttttgcttctgcaccccaggtacaactcctgtgagcaatctggcaaatattttagaaactgtgtagtttgtattgccttgtcttttcatttgaatcttttagatgataaggaaatgagagtggttcacaagataatggggcagacacaggggatagttaagggcctcctccaagcaatgtggatatcataaaatgaatgttaaaaaatgaaagaactaaacaagaaggtgctggggttgacacaaaggacttaaaacagaactaccaggagttgggtgcagcaatggcaatcccttcagttccatcagcaattcagagacctaaacaaatattccctatttatgttgaattggcagactgtagaaatgtagaagacaaaatgaccagaaaaaatgtgtgatttggcatgggtgaaggtctggcaagttaatcaagttgaggactgttgaagccctagggtggtcctgcctttgctgggtgcccagaccataatggcactcatgggaaattgccagcaagtagaaactaggtgttttttttttttttgtagttcttattatcaggcatatgtgcatttgaattttgtcttcatagcatttcctggttctatttctcattttttaaaacacacgtgatttcatctagatttatcaccttcacagggtcacagagaagggtaggaagaagggaggccctggtttgggtcttgtaggaccatggacaagagtgcggagggacaacagggggttgtaagacattattaagaccttattctgcctctcccaagaggctcagttcagccgtttttctgcagttgcggttctgggttataaaccttgtagactcttcccttcaggccagggcggcaactatgcaaattcaagtgggggcctccccacttaaacccagggctctcctccacagtgagtctccttcaccacccagctgggatctcagtgctttcttttctgtcctcctccaggatggggtcaaccgtcatcctttccctcgtcctggctgttctccaaggtcagtcctgcccagggtttgaggtcacagagaagaatgggcagaagggagcccctgatgcaaattttgtgtctcccacacaggtgtctttgccgaggtgcagctgttgcagtctgcagcagaggtgaaaagacccggggagtctctgaggatctcctgtaagacttctggatacagctttaccagctactggatccactgggtgcgccagatgcccgggaaagaactggagtggatggggagcatctatcctgggaactctgataccagatacagcccatccttccaaggccacgtcaccatctcagccgacagctccagcagcaccgcctacctgcagtggagcagcctgaaggcctcggacgccgccatgtattattgtgtgagagggaccatctaaaaccttccgcggtgcaggtgcagagtgagctgccagacacaccctccccaggggcctctctattcatccggggaggaaacactggctgtttgtgtcctcaggagcaaaaaccagagaacaacatgggagcgttcctaacccctaaggcaactggatgggagacctgacccatccagttctctgagggggctcttgtgtgttctacaaggttgttcatggtgtatattacatggttaacatcaaaaggctgcctaataggcacctcttcaatataatagtcttttaattagtgaaaattttacacagttcatcattgcttgcttgccttcctcccttctgtccgctcttactccctccttcttttattttctacttacttttccaaaatcatttaacccctttttgtaccattaataagttatcttgtttttgttgttgttttccttttaacaatatgcactgaataattcatctttgtgccaattcgtaaatattttgatataacaaagacttctgtcataaatagatttcctgtgagtaatcttgcaaatattttagaacctgtttggttaagaataaattaaaataaatagacaaatttttaaagacatacaacctatcaaaactgaaccaccaagaaataaaaaatctgggctgggcgtggttgctcatatgtgtattctcagcactttgggagaccgatgcgggtggatcacctcaggtcaggagttcaagatcagcctggccaacatggcaaaaccccgtctctactaaaaatacacagattagctgggtgtggtggtgttcacccgcagtcccatagtcccggctactcgggaggctgaggtaggagaatgacttgaacctgggaggcagaggttgcagaaagccaaaatcgagccactgcactccagactgagcaacagagtgagactccaattaaaaaaaatctgaacagaccaatgagtaaagagatcgagtcagtgatttttccaacatctcgaatcaaagtccagaacttcatggcttcactactgaattttatcaaaaattaaaaaaaacctagaatctctactcaaatttccaacaaaataaagagaaagaaatatatccaagcttattttggaaggccctatttccaaagcaaggaaaagacactacaagtaaataaaactacaggccaatatccctgattatcatagtttcaaaaactctcaagagtgatgagatgacaaacaaaattaaacagcagattaagaatagaattcaccattatctgtgtctcccatacccagagaggctgctgcttgccctgcacaaggatactctgagcagaaacctacctggcccagccctcaccttgctttatgcagccatctgccctggcagcttaacacaaaggacagcatcttttgggagatacatggccacacccactgcctgagaatccacagtagcccctattcctgggcaacataagccaagcaaaaaccccactgttaatactgtagctggtgctctttggaaagcaccatctccaagcaggaagccaataaacagtccatcacagtatctcctggtagactatcactgcacccagaaaggagaaaatgactgtgtgatctcagctatgaccagtgcctgcaccactctggatgaccaggaggtcctgagtctgtccatgtgaacagttcattaccgctataaccagcattcaagaaagccagtacacaaaggctatcaatatctaaggaatttcagtctccatcactcccctgctgcttccatcagacctggttcactgctcactgctgaaaaattgaggacacatcacaccaccggatccctcacatacattccccaacaccagcctgaagtgtgtcaacttcactgggcggctagacctagagaagcaacaacactcacagtagtatggctcccaggttctcctgctcctaggggaagggagtgcaccacattgagggaacaccctgtgggacaggagaatctggatggcaggccttgaacatcaatcagatccctccattggtgggaaacttcttttagtagaggcagttacagtgctgagctcagcagagaaagtcttcagctctgtctcaacagtcagatatccctggtgcatgtgaaaaacttgaagaagaggaagtctttcccccttgtacaccactgcaggcacacttggggtctctcccataagagctcagtacgggtgcaactatagacagcatttctggaacacatcatgttgactgcatcccccagaaagagcactctccaggttcaggttttggccagacacagagtcacaattcctctgtatttaacacttcaacttttgtacagaggaaaagacatgcctgtctgatctgaatagctggaatcctgggatacgggagtgtcttagaggtgcataactttcctacagacctggcaagacagctgaggtggctccaacccttcccccagataagacctcagtgtgactcactaaaagctcctccagccaactctgtcaaggctgggacttcatttaccacctgatttagccacagctggtttctatccagggacaagccccctactggtctgaagcctgaaccatcaaactagcaaataaatcactgggggaaaataaataaatacgtgcatgccacagaggaatgaactaaggtttaatagacctcaaccattctaaccccatagaagacagtgaacttgctcacatactgagcagatttctactgcaatcaacacataggaaagccatcatacaaagattctccataaccacggaactcttacagagtcttcacccctctaaggaccaaaaaccaaattagactgtaattaattataaccattaaagtctcattcttaagggaaaaaataaatttaaaaacaaacaaaagaaacagttaaaacaaacataatttcaatactagttagaagaaatagtctaccaaaataagaggaaatgagaaaaataactcaagtaatatgacaaaacagggtgctataacatcccaaaaaggtcacactaggtctccagcaataaactttaaccaaaatgaagtctttaaaataccagataagaaattcagaatgttgattattaagctactcaagaagatataataagaaggtgaatatcatcataaacaaatgtataaaagcagttcagaatataaatacaaatttttatagagagatagatatcataaagagaaaccaatcagaacttctgaaaataaaagacaaaatgcagggaaatagtaagggaattacaaaatgccatggaaagttttaaaaatagactagaaaaaagtagaagaaaaaataaacaagagactagaaaaagtacaaaataaaaagttgaagtaaaaaattagatgaaaaaagaagaagaataaagtagaaataagaaaaaagaagaaataaaaaagactatttttgaaataatcaaatcagagaaaaataaatttagaaagaaccaaaagaagtaaacacagtctccaggaaatatgggattatgtaaaatgaccaaacctcagcataattggtgttcctgaagaagaaaaaaaataatatgtttggaaaacttatttgagagaaaaattgagaaatacattcctggcctgcctagagacctagatatccaaatccaagaagttcaaagaactcctgggaaatgtattgcaaaactgccttcaccaagcttatagtcatcaggctaccgaaagttaacatgaaggaaataattctaagagcagcaatacaaaacaaaacaaaaaacccatcagactaatggcagacttctcagcagaaacttcaccagccagatggattaagcttctatcttcaaattccttaaatagaacaactttcaatcaagaattttgtatcctgccaaactgtttgataaatgaaaaagaagtaaagtcattttcagaatcaccagtgctcagggaattcgtcactaccaaaccagcagtacaagaaatgctaaaaggagttgcaaaccttgaaacaaaagcccagtaagcacataaagggaacctcttaagagcctgaaactcacaggcctataaaacaataacacagtgaaaaaaaaaaactaggtaagaattaacatggcaaagaaaacagtaactcatatctaaatattcacattgaatgtaaatggcctaaatgctccatataaaagatacacaatggcagaatagattaaaaaatcacaatggaaatatctgatgtctctaaaagatccccctaacacacaaagatttacataaactcaaggtaaaaggttggaagaaggtatttcacaaaaatggaaaccaagagtgagcaggagtagctattttgatatcagacaaaatggacttcaaagcaacaacagtaaaaaaaagacatagatgatcactatacaattacaaaaggatcaattcaataagaaaatactacaattctaaatttataggcaccaaacaccagaggaactagattcataaaacaagtactattagagatttaaaaaaatgagagcgaaacaatcagagtgggagactttaatacaatcataacagcactagacagatcttcgagactgaaagtcaacagagaaaaaatgcacttaaataactcactgaaacaaatggatgtagcagatgtgtacagaacattctgtccaagatctgcagaataaacattcttgtaatcagtacatgcaacattctacaagatagaacatataataggtcacaaaacaagtctcaatgaatttttaaaacagtgaaatcatatcaagtatcttctcagaccacaggagaataaaactaaaaatgaactctcaaagaaacccttacaactgaacaaatacatagaaattaagaaatctgctcctgagtaatatctgggttaacaatggcataagatgaaaatttaaaaattaccttaattaaatggtaacaagttattgaaaccttaagaatacagcaaaagcagtggtaagaggaaagtttatagtgactactgcctacgtgaaaaagccggaaagagcacaagttgtcaacctaatgttgacacgagaaaaaagaaaaaattaaagaaagaaaatataaatcaaaaaagagaaagaaacaagctgcctgtgttaggctgactcacgtcaaaggcagtaacacgcaaagtttcaatgatgttatctaagggccggagctcagaggaatgggctctgaagactctcccagcactccctcagcataaggatgaaaagaggtaagttttcctatctctcctttagtgtaagtgaacttccctgtcgaatctcatcccctctgctatgtaaactataccttgcctcttgctctgtacgttttaggagtttctgtttttcctgtagttaatgattgcaggttcctgcttctgcatctaagcagtacagcctgagcaggtctggcttgtagccagctacatgccatggtgggggtggcaggatgagtctttgtgagactcctttgaactaagcaggtaatgaccatctgggctgcatgggaaggagtattgctaaccctgagttacaagcctggctttgtttgattaacggcctctgtcttgcctctgtacgtgcgcgttcgtgccacttaggaggaggtgtataagcaaaaccttgtctttgttcggggcccagttgtttggacgttgagtcccttgggacagagtgcactcagtgaagaccctcctgctatgccccgaggtgtcccttgccctcctgatgttccgcaacctttcttgcgagccagcagccaggaggagaagagaggacagattggctgtctcctttgccggagggtctggggctctggtcgcggcgatctgtgaccccagggcggcctcggggagcacttcagcccggaggggagaccggctctccaggcccccggggcccctcccctgacagcgcaaaggagcgcggaaagggctgcgggatgatcccagaagcagcgctaatgaaccgcggtcggcttttggggcccaaggcaggacccgtcccacgaggacggaggggagccccatcacctgccgggctgtgcgtctagtccgacccagggaggctgcggcggcgagagggggtcgctcactcgggtaccgcagacgccgcaaccgacgcggcacaggagagaggcccgccaggccggttaggaaagggaactggggaggggaagtgggtgaaagggcgtgcaagagacggctgcaggaggggccggtgcggggagtgacgtgggaggcgcagatctcagcgtggactgggcgctcccagcgaagcctggggccgacctgggatagcggcgaagcggctggtaggagctgccccgtggcagcagcggccgtgctgggaataggggactctcctagccaggcggccccgaaaactcctgtaataggagacgctctgctcggtaaaaaaggaagtcagagtgagtgtgcgtcgtagagggaggaaatgggaggaaaatcgtggaaacccactccactggaatgtatactaaagaattttaagaaaggttttgcagcggattatggaattaagctgaccccctgaagttgaaaactctctgtgaatcagaatggccttctttaggggtcggctgccggccgagggtgctatatagatagggaggtgattggccgggtgtttaaggtggtgaccggggtgggaggacagccagggtacccagatcaatttccctatatcgattcatggctcaatgttatacaaaactgaccagcgtggttgcaccccccagcagcatattgtaagacgcctgtggcccgagcagccgaagacaaaatgaaagtaaaatcagccatgctggcagctgcagagaaaaagggaaagtcacaggaaagccgagataaaccagttctgcgggcacctcaggaggaaacagaatttcctcctcctcctcatgttccaagccacccccctttgccgagaccaactgctccctctgcaagttcagctgtgaggccagcagccccagctgtccatggggagttaaatccgggagagtatactcccccagcctcaactaagaaggaggaattggagctgcaggaagttagagtggaaagcccagaaagtcaggcaggccatctcaggtctggccgcacctgagtcctgcaaatgcgtctcagggagacgaggggacctgtctattatgaccagcatggccacatccagaggggagagtgaactttcgtttaccagcccttttcaaccactgacctcctaaagtggaagcatcatattccctcttacatggagaagccacaggctctcgttgattgatgcagtccgtttttcagacacacaatccaacgtgaccagattgaaaacagcttcttttgaccctgtttaatatggaggaatggcagagagtgacacaggcagccctccagtggctaaaactaatgcacctgcagacacagttaatgcccagacatatgcatatttgaccctgtttaatatggaggaatggcagagggtgacacaggcagccctccggtggctaaaactaatgcacctgcagacacagttaatgcccaggcatatgcacgggtcagttccctgaaacaaaccccaattgggacccaaatgatgcaacccagttgcagcacctgcagcggtactgagaggcaatctttcatgggctgaaggatggtgggagaaaagcagttaatataggaaaaatctcggaggtgctccagggagcagttgagagcccaagccagttgtattagagactttgtgaggcttatcggctgtacaccctgttcaaccctgagactactgagaatcagcatgtggtaaatatgtcatttgtaggtcaggcccagggtgatatcaggcaaaatttgcagaagatggaaggtttcgcgggtatgaatgctactcagcttattgaggtagccaccaaggtgtacattaacaatgatcaggaggcaaagagggaggctgattgaaggcttaagaagaaggctgatttactggcagctccccttacgggaagggaagctggttttgcaaggggatgcgggtatggatgagggcatggaagaggccggactggatggggatttgagagtcagctgagactagaaagagatcaatgtgtgcagtgcaaaaggaaaggacactggaagaatgagtgtccagagaataacaaggagaatggtcagggctgtggtatgggaaggccaccagcagggggctgccgcacctgggaggaaccagacactgacctaatcggactggccagggctgaaggatatgaggactaggacagaccgggctctttctctttgggcacccaagagcctatgttcagattagaagtggaggccaactagtggactttatggtagatactggggctgagcactcagcagtgacccgacctatagggccgctatccaagaactgtgcaactattgcaggagccactggagtctcagagaagaggcctttctgtcagtcaaagaggcgtgttataggaggacaaggagtccaacaagaattcctgtacctcccaaattgtccagttccttcgctggaaagagacccatttcaaaaattgcaggcacagattacatttgggccacaaggggatgtaactttaaatctagctcactcagaggctatggtgttaacccttactgtcccacgggctgaggaatggagactatatgcaggaaagactccagaaccaggagtaaattaaatgcgtgggttacttactaaaattactggagtttgggctgaaagtaacctgccggaactggcagtaaatccggcaccaattgtagtggagttaaaactgggagcgactctggttcatgtccgtcagtacccgcttctccctgaggccatacgggagtccacaaacacttagattgacttcacaggtgaggaaccatagtcaaatgccagtcactatggaacacccctctcttgccagtgtggaagccgtctggagaatataggccagtgcaggacttgtgtgcagtaaaccaggccacggtgaccatccacccagtgctgccaaacctgtatactttaatgggacatattccagtgagtgccacttggtttacagtcctagatttgaaggacacatttttctgtctccagctggcaccgattagtcagcctgtttttgctttgcaatggggtgaatcacagtatacttgaacaagactgccacagggatttaagactctcccacaatctttgaagaggcactggcctcagaccttaaagcctacaccccaccaagcagtgactgtgtcttgctctagtacattgatgatcttcttctagcagccccaacctggaaggactgctttcaggagacccaagacctcctgcacctgttatggaaggcaggatataaaggcaggatataaagtgtcagggaaaaaggatcaaatctgctctgaaagtgtccagtatttaggcttctatataagcgaagggaaaagattgcttggtagtgaatgaaagcaggcttttgtgtgcttcccactccaaccacctggtgacaaatgagagagttactaaaggcagctgggttctgccacatctggatcccatgtttctcactcatgggtaagccattgtatgaagccacaaagaggggaaagaaggagcccctcctctgggaggccacccaggaaaaggccttttaataaatcaaaggagacttgactgaagctccagctttaggcttgccagatctaactaagcttttctttttatatgcccatgagtgaaaaggaatggtcataggggtcctaactcaagtcatagggtcatggcaccacccggtggcatatttatccaggcaattagatactgtggcacttgcatggacccttgtttaaggcattagctgctactgcttcactggcacaggaagctaataaactgactttgggacggcaactgataatccaggtaccatactcggttataactttaatggacaaaagggggcaccaatggttataaaatccgagaatgatttgatatcaagagctcttatgtgaaaatccctgcataactttagagactgtaaataccctaaacctggctaccttgcccccttcattgctgtgtggacgtagcagatgaagtgttctcaagccagagagatttgacagatcggcccctcggggacccggacattgaatatttcactgatgggagcagcttcatcctagaggggcccgccgagcagggtatgcagtagtgactttggactcagtagcagaggcatagtctttgcctacaggaacttctgctcagaaagcagagctaatagctctgacaagggctcattggctagcaaaagaccaaaagaccaatattcacacaaactctaaatatgcttttgccattttgaatgttcatggggctatttacaaagaaagaggactcttgactgatggagggaaagaaagaaagtacaaggaagaaattctacagcccttagatgctgtgtgggccccgaagcaggtggctgtaatgcactgtagggggcacctgagggcaggaacatcagaggtgaaaggaaacagaaaggcagacaagaggcaaagcagactgcagtggtgactctgccttctaaagaggaagccttggctatgcctctccttccagaaattcccctcccagagaccccaagctacactccaaatgaaagggctttttttgcccaagaaaatgggagctacgttgaaggaggatggtggaaattctccaatgggaggctagccataactgaaatggtggcccccagatttgtaaagcagttccaccaagggactcacatgggaaaaacggcactagagacattattaggttgtcacttctatgtgtcccagcttacggctatcacttgagcagtttgtgaacggtgtttaacttgtgctcataacaaccctcgacaagggcccacttgaccccccaggaattcaggaaacaagagccatccctgtgtaaacgtgcttatgggcttcaccaaactgtcctgagcagggggctatcagtacatgttggtgcttgtctgcaccttttcaggatgggtcgaggccttctccacccagacaaagaaggcatgagaggcgaccaaggtattgttaagagacgttattcccagatttggactacccctgactctggggttagacaatggactggcatttgtggctgaagtagtgcaggacttaactcgactattaggaataaaatggaaattatatacagcctgtagcctgcagagctcaggtaaagtggagcacatgaactggacactaaaacagctactgaagaaattttgtgaggaaactcacctgaggtgggatcaggtcttacccgtggtcctcctccaagtcgggtgcacccgcacaaaacaaaccgggtgttcaccctatgagattttattcggccggccacccccaatcacaggtcaaattaaaggtgatctctgtgagttaggagaactctaaggaagcaaatgcaggctttagggctagctatgcagaaagtgcatggctgggtgcaagaaagaatgcccattggtctgacagacccagtacaccctttcaaacctggggacctcgttggggttaagaaatggaatcataactctgggacccatatgtgatgggccccatgttgtaattttgtccactcccactgctgttaaagttcagaaatcgtgccttggatccaccacgactggctgaaaccggcagcccaggaccagaggaccagctagcaggacccagaccatccgacccagctgaccctgcgacgagactgggttcccagcggagaggacaacagcccggctctgcttacttcggaagctgaccagtctatgcatggtggaagcttgagaaaacagcaagctctgctctagtcactctggaagctgactagtttacgcatggcagaaagcttgagtcgtcatcatcagatgagtaaatgtggccagagatcttaggtccagtaatcttatttgtattattaattatattactgctgtgctattgcttcaacaaatctcctccaccctgcccatgctaggtgtaagaatgctacaccttgccttgtttctgtcgatccccatatctgtcctaggagaggaagagcctatagaggaatgtccacattgcatgtgtactacgtggataggtaatacactagttaagactttattgtaccatacatactatgaacgcacaggaacccctctggggacttgtatgtacaaccaaacgaactattcagtttgtgacccaggggatagctagctttatgtatactatgaccctaagcttttacctgggcctggtttgagattcgcactgggtcaagggaaggaagtcttttaaacaagaccgaagtttctctctcccacaagggagtcacatctttgtattttgatatttgccagataacatccatagactcactctttcccgtaatccacagttccatggagtactataatagctgccataaaagtaagtgtgcatcccctgcttgctccaccggttccctggtaacaacttgctggggctttgcaacatggcctactaaccaacaatcactagggctaatcatgcttaccaaaataccttcagaaccagattgtaaaactaacatttgcaatcctgtgaatcttaccaccttggagccaaattggctcgtatggactacaggtttaaaagcaccactgagggtacaagccagcagccaagaaatagactcaagagtctatgtctatattatatacataaaaaaaaacctgaatccttcttgcccagcagcagttccaagtctttaagtcattcaatgagcactttaagcaggaggtacctgaagctcctcctcctatagctgtagatctgtttgcacggttggctgaaaacagctggcagcttaggtgtttcctcatgctttgtctgtggaggaacaaatatgggaaaccagtggccttgggaaacaaaagagctatcgcctcaagaaaattacactttaaccctttcatccccagagccggcactcacgagctcaagtgtctggctgctaaaatcttctgtcattggaagattctgcattgcccactggggaaaagcctttacaaacccagtaggggaattagtctgcctaggacagcaatattacaatgagacattagggaaaactttatggcggggcaataataagcaaggtaaagatacaaccaggttgccatgccataatccattttcccattttcactctttaaaccactcctggtatcaactagaggcaccaaatgaacacctagcaagcaccttctggcctcgactggatctgtgggccatgagcttattggcaattacctgccaattggacaggggcctgtgtgttggggacaataagaccatctttcttccttgacccgttacaacagggagaggttttagggtatcctatctatgatgaaattaaggggaggagcaaaaggaatatagacataaaaaaagatataaagataggagattggaaggacaccgattggcctcctgaaagaataatttaatactatgggccagctacatgggcacaagatgggatgcagggatactgtacccctatttacatgctcaacagcatcataaggttgcaggcagtacttgaaatcatcaccaatgaaactgcaaatgcattagacctgctggcccagcaagccacaaagatgagaaatgccatttatcaaaataggctaggcttggactacctcctagcccaggaaggaggcataggcgggaagtttaatctgacaaattgttgtttagaaattgatgataacagaaaggccatcatggaaataactgcaagaatgcaaaagctagctcatgtcccagttcagacctggaagccaatatggtctctagattccctttttggaggttggttttcaggttttggcagttttaaaacattaatagggatagtactagctatattaggaggctgtttaatactcccctgcctcttacccctccttatcaggggcatccaatcaactatagacgccgtagttgacaaaaccatcaccacttgactaatggctctaactaaataccaagctgtaccaaacgaagaaaacttgccttatcatgaagaacaaagttgtagtgatgacttctattaaaatttcatacataggaggcatcaaaggcagggtatgagatgggaaaaaagaaaaaaattaagaaaaaaagaaaatagaaattaaaaaagagaaagaaacaagctgcctgtgttaggctgactcatgtcaaaggcagtaacacgcaaagtttcaataatgtaatttaagggccagagctcagaggaatgtgctctgaagactctcccagcactccctcaacataaggatgtgaagagataagttttcctatctctcctttagtgtaagtaaacttccccgtcgaatctcatcccctctgctatgtaaactatatcttgctccttgctctgtaagtttttggagtttctgtttttcctacagttaatgattgtaggttcctgcttctgcatctaagcagtatagcctgagcaggtctggctagtagccagctagacgccatagtgggggtcgcaagatgagtctttgtgagactcctttgaactaagcagataatgaccatctgggcagcatagtaaggagtatactaaacttgagttataagcctgtcttagtttgtttaacggcctttgtcttgcctctgtacattcgcgtttgcaccacttaggagtaggtatataagcaaaaccttgtctttgttcggggcccagttttttggacgttgagtccactgagacagagtgcactcaataaaggatcctcctgctataccctgaggtctcccttgccctcctaaatttctgcaacaatgtcacacctcaagaaactggagaaataagaacaaactaaacctagatccagaagaagaaaagaaataacaaagatcagagcagaactaaatgaaaatcaaacaaaaaacacaaaaaaccaatgaaataaaaagttggttatttgaaaaaataatcaaattcatggaccattagctatattaaccaagaaaagaagagcaaagatccagataagttcaattagaaatgaaatgagacaatacaatctacactgctaatatataaaataatttgagactactatgtacaacttcatgtgcacaatctaggagacttacaggaaatggaaaaattcctagaaacatacaactctcctagattaaatcaagaagaaacagttactttgaatagatgaataataaacaatgagattgaatcagtaattcaagaattgccaacaataccaacaacaaaatagggccaggtgaattcacatttgaagtctacacaaaattcaaagaaaaattgctaccattttttctgaaactattttttaaatttagaaaaaaagaatcctccctaaattattctctaaagctactataacccagatacccaaaccaggggaacacacacacacacacacacacacacactctctacatacgaattttcctggtaaatatagatgcaaaaatactcaaaaaatagctacctgagtccaacagcacatccaaaagataattcatcatgataaaagtaggtttcaactcagaaatggaaggattatttgaacatacacaagtcaataaatgtaacacatcacataaacagaactaaaaacaaaaactataggattatctcaatagatgcagaaaaagcatttaacaaaattcagcgtttttaattataaaaattctaagtcaggtaggcatagaaggaactgacctcaaactaataaaggttatataggaaaaactcacacccaacatcatgctgaatgtgaaaaagttaaaagcattccccctgggaacagaaacaatagaagaatgtccatgttcaccagttctattcaacatagtgctagaagttctacccagagcaattaatcagaagaaaaaaataaagggcatccatattgagaaagagaaagtcaaactatcactgtttacagatgaagtgattatatacctagaaaaccctaaactcccccaaaatactgttagttttagtaaatgaattcacttatgtctcaggttacaaaataaatgtacacaaattggtagcactgctatacatcaacaacaacaaagctgcgaatcaaatcaagaactccatttcttttacagaagctacaaaaagatatttaggaatatacttaaccaaaaaggtaaaagatttctacaaggagaactacaaaacactgctgaaagaaatcatagatgacacaaacaaatggaaatgaatcccatgctcatggattggaagaagcaatattgtgaacatgaccgtaatgcccaaagcaatctacagattcagtgcaattcttatgaaaatacccacattattttttacagaattaaaaaataataatgttaaaattcatatgaaaccaaaaaagcccaaatagccaaataaatcctaataagaaaaaaatggagccatcacattactgaacttcaaattataccacaaggctgcagttacctaaacaacatggtactgatataaagtaggttcatagaccactggaacaaaatagagaacccagaaataaagccaaatatgtaaagccaactgatgttttacaaaacatacaaaaatataaattggaaaatagacaccatatttaataaatggtactgggaaaactaggaagccacatgtaaaagaataagactggatctctatctgtcaccatataaaaaacaactcccattcaaaatttcaaagaaatgcatttacataaattggaaaaaaactctttataatttgtatggctggggtgattgacccaggctatcaagatggaatcatactactactccacaatggaggtaagaaatagtatgtttggaatacagggggatttcttagggcatctcttagcattactttgccatgtgattaaggtcaatgggaaactacaacaacctaatccaggcaggcatacagatggctcagattcttcaagagtaaaagtttaggtcactccaccaggtaaacaaacaaacaaatgaacaagaaacaaaactgaccagccaaggtaactgctgaaggccaaaaaatacagaatgggtagatacaagaaagttgttatcaataccaggtatgaccatcaaccagaaatgaggactggaattgtcatgagtatgtctttcttatcttcttaagaatatatttctgcatgtatataactgtactaagaaaatgttttctttttgtttttcatgtaacataagatttatcgacttcatattagcatttgagagttgttaactgtatatagtggcatttaggttaaggattagtgcattttcagttgtatgaaggatagctgtattatgttaggcataattatgaccttactattgtctttatttggagatcgagcatgatttcaggtgatatgtagggatgctaagttgacaacaagggattggcctgtgatagttaatattaggtttaacttgattggattaaagcatgcttagatggctgggaagtattgtttctttgtgtgtctcttgggttttgccagaggaggttggcatttgactaagtagcctgcaagagaaagacccagccccaatatggaagggcaccatccactcagctgccagcacagctagaataaagcaggtggaagaagaggagataacattgcttgctgcgccttctgtttttgttttgttttgctttgttttccttgctggctgctttcttctgctcttcctacccttggacataagatttcacgttctttggcagttgaactatggggcgtgaagcaggggcttgctgagggttcttgggcccttggtcagagaatgaagtgtgcactgttggcttttctggttttgagacttctggacttagactgagccactaccagtttctctctcttcccaagcttttagaaagcctatcatggaactttcattttgtaattttgtgagaaaattctaataaactatatttcctatatacatatgttatattagttctatttctctagagaactctgggtaatacagctttgatacaaaaaacaacattgttgtattcacaaaaatgtatcctaagataagccaacacataaaagtgcataaagtatgattctatttctaggaattataaaaaatgaaaatgaatctaaagtaacaaaaaaagatcagtagttgcctaaggacagattggaaaattatatttttccaaatgctacaaatgatactctcacctactatgagcattgctctctcctcaggaatttcacccaagaaccgactctatagtcggagacatgcaaacaggttcctgttcatgtacgaactcttcctaacactttcttttcatgtacttccttgacttatttgttgatgaaggttgataccataaaaataactaaaccaggctcacattagagaaaaagaagagagtgatggaaagattaagccggagcatccagtttcagtgattctttgaccctgccctccctgaagtctagaggcagagggatgagccctgctgagcagttcacacttgtccacagggagaaagaggtgtaaatgtgccccccatccatgctcataaaatggcccatggacagcttatcccttgtccatgaaggggatgccacctgatgtcggtgcccttcctcagtgtccacaccttagggtctctgctaatctggggttctcttcttattctcagaggtagggtccctgtggatcaagcctagctgtggctgcttctcagcctgttccctctgtgtttgtaagagtcctacaagaagttcactggtggaatctggaagagaaatgatacagcctaactgttctcagagccttttttacaaagcctctgaatttaccttcattgactctagcatgagctcagcccagcaggcttcaggacaggggttggtgtgggaggcaaaagcgagggattcaagtggaatttgttagtggtaccctccatcaatacaaagaaaaatcataatcctcagggacacccttgtcagcacagtctccctcaaaatgaccaacctgagagccgaggagaaggccatgtattactgtgagagacacaggagatatccgtgtggcaacctaacacaggggacacctgtatttgtgtctgagcccagacacaaacctccctgcagggagacaggaggggaccgtgtgacagacactgctcagaaccaccaaggggagctcagaaccagcaggaggcagtggggacacaaaggaagactcaggagccaccagggggcgctcagaaccacctgggggtggtgaggacaccagggggcgctgaggacacaaggggaggatcaggacaccagggtcggctcaggacgcgaggaggtgctcaggacaccagggtctgctcagaaccaccagggggcactcaggaaccaccaggagaggctcagccaccaccagggggcactcaggacatcaggagctgctcagaatcaccagacggcggctgggcgcggtggctcacgtctgtaatcccagcactttgggaggccgaggcgggcggatcacgaggtcaggagatcgagaccatcccggctaaaacggtgaaaccccgtctctactaaaaatacaaaaaattagccaggcgtagtggcgggcgcctgtagtcccagctacttgggaggctgaggcaggagaatggcgtgaacccgggtggcggagcttgcagtgagccgagatcccgccactgcactccagcctggggtgacagagcgagactccgtctcaaaaaaaaaaaaaaaaaaaaaaagaatcaccagacggcgcacaggacatgaggtggcgcacaggacatgaggtggcactcaggacacaagggggagctcagaaccacctgggggtggtgaggacaccaggggatgctgaggacacaaggggaggatcaggacaccagggtctgctcagcaaccaccagggggcgctcaggacatcaggagctgctcagaatcaccagacgtcgctcaggacatgaggtggcactcaggacacaagggggagctcagaaccaccagggggcgctcaggacatgaggtggcgctcaggacacaagggggagctcagaaccaacagggggcgctcgggacactagggggtgctaagaacaccaaggggcggtcaggacatcagggttctcttaggaagcagtgcatcatcaggtccctggggagggtgggtttctttatttaggccttgtgattcctgacctggtaaagtgaaactcttctcagcatcttttgccatttcttccttggaatccatgtttctcttacctacaaaatcctaacttagaacaggaattcaattaaacttttaattctttatatttttgtaataatactagtaataatatctcagtacaattttaaaatgaagaaattgtgtatgcttacttcaaactatttacacagatttttgttactgtgctgtgtcagtcacacttttgtaaatgttttctaacaataactcagcatatgcatggtgttgagtttctttttcttccatttgctgattgtgaagatgaaaccccactttaagggctcctgtcctccactttggtggcccctggtgttctgcccctcagtctgtttctccaccttcccttcttctttccaaaccttttataatcctcaatttccattcaaggaatcagcaagcccgtttattatgtctcatccatgtctggtgaatcagttcacttccctttatgatcactgaagccaaccaagtataggcaggcaacagttctaagaatatgctcatctacctgcagactctctgccctcctcacccctttcaacggtcctgcagacatcaccccaccccatcctctatcttccctaagtaccacagagtgggctctgcagctcctgctgcccactgtgtgctcagccctggggctcactagtgctttgatgataaagcctaaatccctaacgtgtttgcacacttcctgaccaccctctagcaagttgtcattgtgagtgaatcctgggaaccctgtgctgatattaattctatatttatggatattctctagcatccaggaatattgtcaaataacctatcgagttgatgttaaaaattcatgtgaagccattgcaaaagaaaaaagtctttaaactggaaattgctattttttaatacttaatatttttttaatttaatatttaaatgctatttaaattagaaaaaggtgatgccttttgtaaagtacaatgttatttcaaccaatcgtgtaataaaattttaatagagatgcttgccttattgattattatatttatttataacattaaatgcattaaaacatttatttaaaaaatatgctattagtaaaaatgggaaataagctagcacagagtatgtaaagaataccattgtatttttcaatgatagatttgtcaataatggcagttacagtaagttttattaaaacatgcatttacatatatttcttaatttacattggaatagacagacttactcatagaagaatgttactttggactaaaaccttaaactataaatacaaataaatccatataaattaaatatataacacagaaacaaatgtatgtcactttgatgtttggaaatgcatttatttttgcctgtgcacatatatgtttcattgctgggtgtgtgtgtctgtgtctgtatatatgggtgtgactgtgaagtttcaaaatacattattaacttgtatagttatataaatctaagtttttttatgttaaaagatagtaaaaaaacacacacaaaaatattctagagagcatttgcaataactaaggagtattcaggtgttgtattaataatgaaaaactagccaaaatgtttttaaacttttattttaggttcagaagtacttgtgcaagtgttgttttataggcaaattgtgagttctgttggtttgatgtacagattattttgtcaccaaggaaataagcatagtacctggtaggtagtttttcaattctcaccctcctcccaccctccacactcaagtaggacctagtgtctgttgttttctttgtgtcaatatgattagctcccacttatacatgagaacagatggtttgtaattttctgttactgtgttactttccttaggataatgacctccagctccatctatgttgctgcaaataacatgatcttattcttcttatgactgtgttgtattccattctgaaatatacataaatcagtaaatgtgattcatcacacacacacaatcatctcattgatcaatattaactttcaatgtaaatctcccaggaatctttcatcttctcttgaccctcccctctcctcaggcatcccaaaccatagctttctatatattaggatacatgaaaatagggccctctctcagctgatgaaaaccagcccagccctgactctgcagctctgggagacaagccccagccgtgcagtaccaaggtgcttccattcagtgattagcactgaacactgaagacatcccatggagttaggaatgcgctgggttttctttgttgttgttctaaaaggcaatcaagaagaactagaaatattgtctgtgagtgatatgagtgagagaaacagtggatctgtgtggcagtttctgacaagaatgtctctgtgtttgcaggtgtccaatgtgaagtgtagctggtagagtctgggggaggcttggtacagcttggggggtccatgtgactctcctgtgcagcctctggatacactttcagtaactatggcatgcactaggtggaccaagctccagggaagggactggagtgggtcttacattaatgctagtggtggaggcatatactactcagactctgtgaagggccggttgaccatctccagagaaaacaccaagaactcactgtatctgcaaataaacagtttcattgctgacaccatggccgtctattactgtaagagacacagtgaggagaagtcagtgtgagcccagtcacaaacctcctacaggaacgctgggaggaaaatcagctacagggctcactcaaggcccactgatcagagtccactccagagggaggttcacatggaggttaggggctggttttctgtcaggacattggacttcatcatcttcttccattactttctttagggagcctcttcattttagaattctgtgtgtactattgttatatatacatatatatatatatatatataaaataatcatagtaatgcgaggacatattttctcatgcacaaaatgtagattgacacttacagagaagaaaaattatcaaccaatgtcaaaaacatcagagtcctggaaaatcttaagtgttctggtgggtcatctctaatcagacccagaacagtaacctcagtgaaattccatgattcagatactatttttggattctgatcataaccaagacagagtctggaccagggtcagtgtcatatagaacctcacagcttccatatatgacccttctcttgacagtgaaatatgaaattcagtatcagcagtgatttgatttttcttttgctttccgtattctttctttttagttgttgttgtttagttatttcttttgctatatccattttctttttttttagttgtgcctttcacttttggctttcacttttccatttgcttttcctgcttcctgataaagggagatgtaatccctgtggtctaaattccagggctcaagccttttcctgggagctcaggtgggtctcaggatgtggctcctgcagccacgtgaaagaggctgatgggactttctttccttctcatgactcaggcattccacggtgttgtgtggagactcatctgagattgcacgtggccattagtagtgaaggggatgagatgtgggtgtggactgatcctgtgctgtgcaaattgtcattagtagtgaaggggatgagatgtggatgtggactgatcctgtgctgtgcaaattgtcattagtagtgaaggggatgagatgtgggtgtggactgatcctgtgctgtgcaaattgtcattagtagtgaaggggatgagatgtgggtgtggactgatcctgtgctgtgcaaattgtcattagtagtgaaggggatgagatgtgggtgtggactgatcctgtgctgtgcaaattgtcattagtagtgaaggggatgagatgtgggtgtggactgatcctgtgctgtgcaaattgtcatggagtcacttttctcaccatagtgttagaaagagactgtaaaagttgtcagaatcaaactgcaacaatttgtgttaaaacctgggaaatggagctgggaaggccatgagggagggttctcatacacatgccttccataacaagaactgtcataaatagattctgcaaaaccacaaccttgcacaaaggccagcacaaccttaaaataattacttctccaagtacatctgcccagaggtgcctgtgcaatattacactgatgccaccctggttattgatcattttatcccaggttaagtgtctcaaaaccgcatatgtggccctcctcattttttctttaaaacactttccttatttacctaccgaaatgtgcccgtgcacattcccattgcaatgctaattctcaaataaataccactttactttagagtttctttctgtctgatattcaggtttgacaagctgcagatggacttgccaattttctgtgggatacagggtataataattatgagagatgtgtaggcatgttcaatgttcataagagcaaccgtaaataaatgcaggctggaagtctcagagagagctgaatgtgctgaaacaccatactattttatcttctcccattcttttctgattggaatcagacccaaccaggttatcaatgccaatctacctaagctagagccaactgattacggtatcaacagcaacaatagctttttattttctgcttggctttgtattgttaccttgttccatcctctagagtatctatttcagcccttcggataccggtttcagaggctttcccctaaagtgtaatttcttagttttgtagtggtgataagggaggaggtgggtctggatgtgttttagaagttcaggctgtcattctctcccagacagacactttagtacagaacgatttatgtggttgtcccatttctacaggaaagatattcaagagaataagaaagctcttcagtatttggtccctgagaattttacactagagcacattcaccactcttgactttaagcaacctaattaatgtatttgaagccttatcttgaaatagactatatttcatatggcagactctgcctcaggtaatctcataccctgactttgttactctctacaagaacttgtctctccctaaatttcagatttgttgtttgtcttaaaatttcgattatctgaagtatgaaagacaatttgccaagtttcttattttctgttcatctgttattgttgatgttgttgttgtaaaatacaaaaatatatatatttcttatctaagtacttctgcaagctgagtagcagatatttttggtaaaacccagaataacagaagagtccacatattaattagcttcttaataggaaaaatcattatagtaaatttgttcactggactgttacccatcatttataatgtacaaatatctgatacacacaacaaactaaaatatctaggtatttatgctgagtaaaataagccaaaaaaataagtatatatgctatattattccatttctataaattctggaaaatgaaaactaacctacaataatttaatgaagaacagttgttgcctgaggaaatggtagaagaagggaaagggataggaggaaatgtggaacaggagaaaaaattgaggcgaattcacttgtccactttcttgataatggtgatagttatgtcatgtttatcaatgtatactttaagtatatgaagtttattatctctcaattagaccttataaagtttattacaagcaaacaaataaaaaattagacaaaaagaactgatagaaaatgggtaacatatgttaaatgccagttacctgaaaatttatctgcgtgaaccttagttctctccataattttaggtgaacgctggagtgtaacagagtcacaatattttcattaaggcagtaagttctgcaagccacactagacatgtcccgctctgtcctggagttagttcagggaacacagtgatgaggaacacgggctcagataccggaactcactcatctcagacatgagcacttagacacatacataggcactctgtgtgtgggtttactttcacatccgtacatggagaaacattgagtctcacagacataatttacacacatatttaaaatataataaggtgtttgatgctgtttatcacagcacaatttcctcgtaaaagtgcaaatcttctaaataccataagttaccaaactcctgcaggacaccatcatcctctctcggcaatgccttctcctcacgtgtcccaccctagagttttttatgtagttggaaatatgcaaaggaccctccttctttggtgaaaaccagccctgccctcaccctacagttctgggatgggagacccagccctggaatttcaaggtttttccacatggtgattagcactgaacagagaactcaccatggggtttgtgctgacttgggatttacttgttactattttaaaagtagattcagggtgaactagagattttgagtgtgagtggataacagttaaggaaacactgaaaatatgtgccagtttctgaccaggatgcccctgtgtttttgggtgtccagtgtgaggcgcagttgttggagcctgggggagacttggtacagcctggcgcggtgggggtgggggtccctgagactgtcctgtgcagcctctggatttgccttcagtagccactggatgcactgggcctgccaggctccagggaacagactggagtgggtctcatgtattagtactgatgggagtagcatacgctatgcacattctgggaagttctgattccccatctccagaaacaatgccaagaacacactcttatctggaaatgaacagtttgagagctgagtacacagccacgtattactgtgctggagacgcagtgaagggaagtcaggttgagcccagacacaaacctctctgcagaaacacatgaagtaaatcagctacgggggcgctcaggacccactgatcagattcaacctcagaggcagatgcagatacagggtaggagctggttttctcatagtgtttgtaacttccctctccaactgacagtttcccagagaacctcactaatttagagttctgtgcctaccaaaaaaatctccaaatatacaccttttaaaaggtagtaatataaaggcctagtctcacatgcacaaaatgcagatcaccacttccaggcatgagaagttctcaaccacggtcaccaagatcagagtcctgaggaagctcaggggtgccttgtgggtcttctccaatcacattcgggacaggaaactaagtttaattccctgattaaaaaaggctataattccctgatttaaaacgtttcattccctgattaaaaaaggctggaatttttctgattccagccaagaaagaggctgggccagagtcagtgtcacgtacaagctcacaggtttcacgtctgccccttctcctgatatgagactatgcaaagcagtatcagcactcatctgctgcactttttgctgtcaatccattttctttcttttcagctgttgtcactttttcgttttcttttctgctccctgaaaaagaaagatgtggtccatgcggtctaaattccaaggctcaagctcttccgctggagctcaggtggggctcaggctgtggctcctgcagccgcatgggagaggctgatggggctttcttctttccccagtgcttgggaccctccaccgtgtttcatggggactcatgtggaaatttgagtggcccaggggaactgaagggcataagcttgtttggtgagagtgaaacgtgactgtggaattgattctttgttgtgcaaaccagaagaaattttgaattttgtcagaatcaaaacggagtcacttttgttaaaacttttgcaaatgggactgggaaaggccatagaagcagggttctcatacacttacacttggtaacaagaactaccacaaatagagcctaaaaaacacaaccttgcacaaaatccaccacaactttaggaaaaagctacccccacaaggatatgtcctcatgtactgtgagtccaactttccactgttgccacccttgttattaatctttgcagcccaggaaaattgtctcaaagcaacttagcaacttacttagcccttcttattttaactttaactgcctaagaatttataccgtgaagtaattgcttcatttagtgttaatattaatgcccttttgacaatctttgaagctctttttttctgatatttcttccaacataaagaatgggagctttttcaccatataaagaatttttaggaagatatgatggaaagggaaactcaatgtattgttcagtgtttctgcctaacacatcaatctcttaaaatattttgctgtgtctgcatgtgataaagcagatgctaacactggagataaaagaaaaaaatgcacagaccttccacattccaaatcataaagtggtactggatgtgtttctgatgaagtgaaccatgggtcataagtgctagtgcaagtagctttggaaaatggagttcatagcttcttaaagttttgctagttttaatttaagaatgttatttactatttctttttagtacaagctttccagaagattcttgatggtaatggaagtgtcgcatttaagaattacaaatgactcacagagttactttgtaattttttctgtagggtgtacatgtcagtcacttgacataaaagctcatatgtcacagatagaaaaatgaaaattgagccaattttaataactgcagtggaaatagtttttggcaatgagtgcttcaagacaaccacaaaataaatcggcaaaatattaaaatacagcaggaatctgatctcagtttctctgccttataagaacaaggctgtcccacatcaaaattattattcaagctctaggaaaaaatacacttttggattctggaagctaaaagctctctccttagatagtgctaaagtacttgtgaaatgcagagttgtgttcatgaaaaagatgactttattgtgattttttttttttttttttgcctgttgacaactcaccaatctgtctcagatgtaaagccctgctctatgggttgaatgtggttgcacatgactggcagagactgattattcataactccaggtgccctgtctttggagcagctacaggagtcaggcccagactagaagagcccacactgaccttctgcatcacttatgctctctctggccactacatcacaaacagtgcttatgactgggcctgaatctgccagcccaggaaagggctggaatggatggggtgcattggtagtgatggtgggggtcctactagcctgtggcaaatggaagcatctcttttttatcagactgaataatattgtagtgttttcttataccacatttacttcatccctttgtgcattaacacttaggttgtttttatatattggctgccataaatagagctgcaattaatataagagcacaggtgtctttacaagttcatgattttatttcctttccctgtatttccagagaagcgtttgctgagtcatattgtatttccatttttgatttatttatgagctgctatactgtttttcataatggtgcaactaaaaaatggtgtagtcatcatgaaaaacagttttagtttttgacataatccaaacacaatgtttgaatctggttatctataggagtttctagtaaaattggtgaatgtaaattaaaaagcagtaagaaaaatctgcaattcagaaatagtgtacccagatggtctttctctccgaaatgaaagagaaataaactatttctcaggtgagataaactaagatattttcttcacacttgaccagtcatacaagaaatattcaagggaatttttgtataaaagccagcatatgaaaaccatcagcttggaaaaaaacacacaaaacctatatttcaatggtagaaacaattaaaaaaggagaaaagaaacaaacattattactacaaaacaacatcaaatcataaaaccaaacagaaagagaataaacaaagatagagatatatacatatatacaaacaatcataaaacaataaagaaaataatttgagtaaatacttataaataataaccttatgtaataaaattcctcaattaaaaatacagtataaaaattgattttattaaagtcccaactctatgctgcttacaagagactcaaatcatctgagaatctacacacagactgaaagtgagtgggtggaaaaaagatatgctacaaaaatagaaaccaacagcacaaatagctctacttatatcagacacaaattttaagtcaaatgctgtaaagggagaccaaaatggacattatataataaaaaatgatcaatgtagcaagaatacgtaacaactgtaaatatacatatatacatatatgttatatatatgtaacaagaacacataattgtatatatatacatatatacacacacacatatatacatatgtacccacacctgagaactcaaatatgtaaagcaaatctattacatagtaagggatagatactaaccttatacaattatagttggagaatttaacacgttatttagcattggatatgttacctagccaaaaattaacagacaaacattggatttaaactgcactatattccaaatggacctgaatttacagaccattgcaccaaacaacttcagaacacatattcttttttttttaaaaattaaatggatgtgtttatttatctttttttattattattatactttaagttttagggtacatgtgcacaatgtgcaggttagttacatatgtatacatgtgccatgctggtgtgctgcacccatcaactcgtcatttagcattaggtatatctcctaaagctatccctcccctctccccccaccccacaacagtccccagagtgtgatgttcccctcctgtgtccatgtgttctcattgttcaattcccacctgtgagtgagaatatgtttggttttttgttcttgcgatagtttactgagaatgatgatttccagtttcatccatgtccctacaaaggacatgaactcatcattttttgtggctgcatagtattccatggtgtatatgtgccacattttcttaatccagtctatcattgttggacatgtgagttggttccaagtctttgctattgtgaatagtgccgcaataaacatacgtgtgcatgtgtctttatagcagcatgatttatagtcctttgggtatatacccagtaatgggatggctgggtcaaatggtatttccagttctagatccctgaggaatggccacactgacttccacaatggttgaactagtttacagtcccaccaacagtgtcaaagtgttcctatttctccacatcctctccagcacctgttgtttcctgactttttaatgattgccattctaactggtgtgagatggtatctcattgtggttttgattcgcatttctctggtggccagtgatggtgagcattttttcatgcagaacacatattcttttcttcagcgcatgtgatactcttcagagttgatcatatattaatacagaaaatgtatcaaaaaatttaaataaaattataccgacgttttatctgactaagatagagtcaaagatggaatcaaactaaacatcagtaactggaggaacttctttttttttttttttgagatagactctttctctgtatcccaggctggagtgcagtgacagaatctcggctcactacaacctccaccttccgagttcaaaccattctcctgcctcagcctcctgataagctgaaattacaggcacctgccaccactcctggctaattttggtatgtttagtagagagggggtttcaccatgttggccaggctggtcttgaaatcctgacctaaagtcatccaccagcctcggcctccaaagtgccgggactacaggcatgagccaccacccagcctggagaaaatttcaaaaaaatataaacacaaaaattaaacaaatcactcttacatggccaatgggtgaaagaagacattaagaagaaaataaaaaatgtatgaaacaaacaaagaaacacaacataccaaatcttatggcgtttagtcaaatcactattatgaggcaagtttagagcaataaatgcccacatcaaaaagtagaaatatcttaattaatcaaaataacaatgcatgttagagaacttgaagaacaagaaaaagctaaattcaaaattatttttaaaaacaataaagagcagattagatataaatggaattaagactaaaaataccagaaaatattaaaatagcaatagtctttttaaaaaagataagcaaaattgaaagccattagctgggctaacaaaaaaaatataaagagctaagacatgaataaatgaggtagaaacagaagatgtctcaactgatatcccagaattaaaataaattaggaaatactataataaattatgtgataaatgtgaaaacctagaggaattggatacattcctggccatatactacctaacaagattgaaaaaggaaaaaatagaaagccttaacagaccaataaaaagtaatgagagggactcacttaaaaaatctatatcctattgaacataaataaaaaaacccaaattactagcacagcaaatcaaacagcatttaaatactaatactaatactaatacagcatgacaaagtagaattcaacccagggattcaattatgctttaatatacacaagtgaataaacatgatatatcacgtatatacgacaaggatgaaaaacatatttttactttaatagatgcagaataagtactttataaaactcaaaacctcttcatgaaaaaaactctcaattatgtgtagaaagaacaacacaataagaccacatgacaagttcatagctaacatcatacttaacagaaaaaaagtttaatgcttttcttctgaaaactggaaaagacaaggaagccaactctcagcacttattcaacacagtactgaaggtactagccagagcagttagacaagagaaagaaataaaggggattacaattagaaaaaaggtagccaaattacctctaatttcagatgacataatcatatatatactaaagactcttgtaaatgctcttagagctgatgaatttagtaaagtttcaagatacaatatcaacatagaaatctcagtggggtttctatacacaaacaataaactaggtaaaaaaaatcaagaaatcccattttcaataactacaaaaactattaaacacctaggaatacatttcaccaaggaggtgaaaatccgtaaatgaacaaactatgaaacactgatataattaattgaatgagacaaacacaaaataagaaggacaatctgtattcatgaactggaataatttatattgttagaatgaccataatgcacatgacaatctacatattcaatgtcatctctatgaaaataccaatggcattattcacagaaatattaaaaagcattattaaaatttgtatacaattgaaaataccccaaatgactaatgcagtcttgtggataaaaaacagaggtggaggtattaacaaccagatttcaaaaaaaattataaaactgtaataacaaaaacagcgtagtgctggcataaaaatccatggaaaaaagtagagaaaccaagacattaatccatatatttatagataacttatttgcaacagaggcaccaaaaatatttattgtgaaaagaaaagtatcctcagtaaattgtgtagggaaaaactgaatatccatatgcagatgaatgaacttacattcccacatttaactgtatataaaaatgaaataaaaataagttaaatactcaaatggaagacccaaaactataaagctgctcttaaaaacttagaaataatgcttcatgaaatctgtctggaaaacaattttataaataagacctcaaaagtacagtcaactaaataaaacacaaacgaattaaattttatcaaactaaacagtgtttacacagtaaaataatccaaatattgaatagataacataaaagtggtaaaatgtattttaaactattaattaaacaggctattaatatccagaatataccagaaaaataaatgtctcaaccacaaaaatataaataatcttattttataacagacaattaacccaaataagcagacgtttctcaaagaaacacatacaagatgccagaaaatatttgagaaaaaatggtcaccatcggtaataatcaggaaagcacaaatttaaagtacaatgaaatattatctcaccccagacagaatagccatattcaaatacataaaaatagtgctaatgtggatgaagataaaatgggacatgtatacactgttgatgagaatgtacactcatacagccactatggagagacgtatagaagttagtaaaaccacaaatgcaacaatcatatgatacagaaattttacgactgaacatttgtcccaaggacaggaaattaatatattgaagaggaaaatcaatattttgatgagatttcttcactcccatgtttattgcagccctgttcacagtagccaagtaattgaatcaaccgaagtgttcaatataaggtgagtagagaaagatgatgtggaatatgtacataatggaattctacacagccatgaaagattaaattgtgtcactcatagaaacttgcatgtaacatataagactctatgttaattgaaagagccaggaacagaaagctaaacaccacatgttttcactcccataaaatagtcaagaaatatccataaaacataaataattgaaattggacatgaactatagaaacaataattgtcacctgaatatttattttccttcaaataatatataattcaatgatagtaagaagagtcctgataaataaatcatgttgagataaagagctactgaattgtgcattccacactaaatggaaacaatgccataagatccagtgttgtgtaggatctgtttacctttttacctcaaatactacaagtcactcccttgttctaatcaccccgcaaaactgatattttgttgctttatgttatgtcagtaaaaatgattccacattggaagcttcatgtgttgctcagaaatcaccctgttgataaaatgagcacaactacagttacaacctttctgtagatattttctgcatatgatcctcactttttatttgttgtttttgttcacagtttctttaagcactcagagttatatagcatattttcagcatattttaattattttccattgttatggtcagtgctcctgtgggctcaagagtcaggtgttgtgtgactgccagttgacttcactgccacctttacctacacaaaacactgcaagatgaaccatgatgtgtaagaacccatccacaaagtgcttcaaataaagacaaggtgacttgtgtatagatttagtgagactggggaacagttcacggtgttatgttacagaggagcagaaaggtgaatctctctcggagttattgagggtgtaagagctgcagttttggagggtggtgaaaggcacttttgagtgggaagccctagagcatgtgtgaaagctgaaggaatgatcaccatgcacatggacgctgatgaggcatgtggtaaggtccattccctccagatgttcctggatgggcggttgtaggatggctcatgtatatgaaaatgtgggcagggctgaaataggaacaaggccatcatcccacgggaatgcgagaaagcaaaacagagatggacacccatgaagagagctcattagacctggtgaaggaaagataggaatctcttccaaaggctccgctgttcttggctaaatatgaattgtggtgatagactgaaaataaggaggggaagggagatatgactcaagagaggaaaaaccctaagacagcataaaccaaatctacacagaacaatcacatggtagatgccagggtggggctgaaacaggagcttcaatctactgggtacctagttgagatcctttgacatttcttgtgaggtaattctagtgatgatgaatttcctcagttttcctttgtctgggaagtatttctctatccttcatttcataagagatgttttatcaattttaggttcttggttggctgctttttccccccagaaatttaaatccagttatttgctgcataacaaagtttctgccagtaacagatggtggttccacggtgctatacttccttacttatctatatctctttatgtttagatacacaaataattactactatgtttccatggccaacagtattcactacggttgtttctgagtcactggggtgttgctttttctggccagaaccctctgtggccagtggcacttttgcctgagttcttgtcctacatgtggaaagaatgaagtatgcagccatgtggagggtaagcaagacaaagcctagcttcattaagcattagagcatctcagaggagacccccagtgagtagctcctctctgtaggcaggtagactggttgagtgttcagctctaagcagagagggtagctcctccctgcagccggtcgtcctgtggtcttcccagttctcaggagagagggtagctcctccctgcagctggtcgtcctgtggtcttcccatttctcaggagagagggtagctcctccctgcagctggtcgtcctgtcgtctctccatcctctgtcctgctccagctgaggccaggggtttttacggacctccgaggggaggaagtgcaagcccattggtccatgggtgctcatgggtgggccgtaggaagcaccacaagtcccgactctggtctgaggatctgggagccccggcccagccttcaggcccttcctggggacccgcccctgtgcacaggatcttcctgcctcctgttgtagttcatggtccctggggctccgccctgactttgctccaagatcagagcaggcaccagcagcaggaagaagccaggaagtgggagcaggcacttcggagcatgcaagagcacagggcttttcctggggaccccaagagtgcaggggcgcctgaggccgcagcccccggtttgcggagcagggcttctgccggcttcatggagcgagaggcccgtgtcttcagccgcagtttgggaggctgcagccacagccggggaggcagggctccttcctgttcctcgacctccaagagcacagagtccgagcccactgccctggtttgcgcagctggagccgcacctgagagatgagagctgctgcctgctcctggctcccaccggctccgtggagcatcagcccctccacccctccttgcagcctgggcaggggctcctgatcctctctgggccctggccggcgtccagggcaggagtgacatctccacaagctccctgcattgccccggtgctcagggaggcccgggcagagctgatgacgaccccggcccgtagtcgggagtggcggcctccatggtcaccctgacatgcggctgaaccctggggacgcggcccaagcagcctgcacagaacctcccaaggcccaggaaccccgcaccctaggcggggtgggcacagcggctgctccgctgcccgggttttcaaggaggcgccacttccacttccctccctggaaccccgaagtttgacatgggggctcctttctgccttgctccgcagctccccttcccccggagtggagccccctgtttccctggcgttccctcccacagctgcagtgttctccatcggtgtcatcaccttccagctctgctgccctgctctgcagactaaggctctgattccataagagaggggagctgcttcccagtagaaccttgctggggagctctgttcccatctcagttcctgaggggttaaaccagtgcatttaggatactggttttggtggtttgcccctgttgagtaatttcttagttctctagtgggtgtaagagacttggctctggaagcatttcagaagtgtgggctctgatacaccccagacagacactttgggaagggaagatttttgtgactattctcattataagggaaaggcattcaaaagaatagaaaaactctccagtatgtggttcctgagaatttctcactaaaaacatgcttatcacactcgactcaaaacagttcaatgtatattagtgtattttatcttgtactagcctttattgcatttggtgaactctgccccagttcagctcatactctagctttgattctccctacaaaaacttgtctctctctagatttcagatttgttgattgtcttaaaatttcaatgatctgaagtattaaagaaaatttgcaaaagtccattttctctgattaacagttattgttgattttattcttgttgtaaaaaaaagaaattctcatctatgtacatttcaaacctgaataacaaaatttttattaacaccaaaaataataaaagaatccaaatatttatcagctgcctaatagaaaaacaaatcatggtaacattgttcgctggaatattacccatcattcataataagggaatgtctgatacacaaaataagaagataaaattatcaagtatttaaattgagtaaaataagccaaacaaataagagtatgtatgattctatttttaaaaattctggaaaatgaaaactgatctaaagtaatataaagaagattagtagtttcctgggaatatgttggcagaagggaaggagaaaggataaggaaatagaaataggaagtagaaggacagaaaagaagttgagggaatttcacttgtccaccttccttataatggtaatagttatgccatgattatcagttttacactttaaatatgtaaagtttataatctgtcaatcaaatcttataaaatgtattatgaggaaacaagttgaaaattagacaatgtaggagtgacagaaagatagatatgagtatgttgaatgtcagagatacctgaaagtttatctacctgaaccctagttctctccatagtttaaggtaaacaggagagtgcaggaaaatcatccatattctgattaggcagtggcttctgcaaaccacactaggcctggccggctgtgtcctggagttggctaagggaggagtcagggccagtggtgagaagtgcaggcccagataccagaactcactcatcccagacatgagctcttagatacacagagagcccatccatgtgtggatttatcttacatctgtaagtagagaacattgactcttacagaacataatttacacacataggtaaatctgaaataaggtgatcagtgtgaagattttatcacagcacagtttcataataagcacaatttctcaaatcccattgttgtcacccatcttcctcaggacactttcatctgccctgggtcctgctctttcttcaggtgtctcaccccagagcttgatatatagtaggagacatgcaaatagggccctcactctgctgaagaaaaccagccctgcagctctgggagaggagccccagccctgggattcccagctgtttctgcttgctgatcaggactgcacacagagaactcaccatggagtttgggctgagctgggttttccttgttgctattttaaaaggtgattcatggagaactggagatatggagtgtgaatggacatgagtgagataagcagtggatgtgtgtggcagtttctgaccagggtgtctctgtgtttgcaggtgtccagtgtgaggtgcagctggtggagtccgggggaggcttagttcagcctggggggtccctgagactctcctgtgcagcctctggattcaccttcagtagctactggatgcactgggtccgccaagctccagggaaggggctggtgtgggtctcacgtattaatagtgatgggagtagcacaagctacgcggactccgtgaagggccgattcaccatctccagagacaacgccaagaacacgctgtatctgcaaatgaacagtctgagagccgaggacacggctgtgtattactgtgcaagagacacagtgaggggaagtcaatgtgagcccagacacaaacctcgctgcaggggcatctgagaccacgagggggtgtcctgggccctgtgaactgggctgctctccgtggcagcggctggtggtgctaaaggctgattttctctcagcatctggggctgattcatcaagtttcctcagagacctttcagattacaattctgtacttacgtttaatgtctctgaatgtgacactttccttccctggtgtgtctttgtttttgtgacaagaggacacattctcacctccacagaagcccgagtgtcactttggggacagaaatgaccctgccctggtcaccagaatcagagtcccgaggaagcccaggaggacctgggaagtgtttttcaatcagactcagggcaggcgtctccgtgggaatctctgattggaacaggctttgggattcagattgggaccaagagggaggctcacccagggccagggtccttagaatcctgacagttttcacagtaaccccatcgtcctttaaaactgaacatctaactcagaactgacccatttggtcctttctctgtaatccattttccttttctctaggcttcattcttacacttcccttttcaccttcattctgaaaatggagggtgtgcttcctgtggtctaaaccacaggcctcagatgcattacctggaactcaggtgtggctctggctatggctcctgtggacctggcaggctgagggatctttctcattccctggtgcctgcatgcccctgctgtcttctatgcgtggatgcatttgggaaatgcaagtggacactcatagtcgtttcctcaaatgggatactgttgtagagctgatcttgtgcttctcaccctgtcacagagcccccactctcacttgtggatttttgggagagctgaggatggacactttattgggctgtgagctctgcatgatggcaatcgtgaggtctgggtgggcacagccagagccaatggagctggccaaaaggaaagacaggacggaattcctgggaagtcctacagctgctgtctaccatagagttccattgtcttctcctctgctaggattaaaccagaccgaccaagttcatctaggacaatcttcctgacctagagaagtgatgacaggctttaataacacctgtattatacatcagagcaacacctagattagtgtttgattgaataattgagactatgtcctagtcaaggtgacacacaaaatcaattattaccatgattaatattttatattgattaatattttaatactaatattaatcaatgcaatattgatttaatattaattaatattttatatttgacaatagaatcagactcatgttataaataattttgcaaatatatgtatattattattggtcttctgagcataaatctccattagccgattaagtgtgcatgcattggtcgaaggagggcatccacccttttgagggaaaatgcatggagggtaaatgaggctgggaagctgatggcatatgatggaagcctgtccctgagtgaaggagagagggaggcaggattgggtggaactttcctacatttctgtgctgtgcaaagaaactccagattatcactgagtctcctgcaagtcaaagttgcccctcaggaaacccccatcactcccagcaatgactctgccccagatgagtgcaaggctcactctattcctgagaaaggagcacaggatatgggatttagcatgagccacgtcatggacgtcagagagcaggagctgggtgcatgatccaagtgcactgttctgcctgtaggtggagagaggaaggtgcattcccagagctaacacactgtggatttttatacagaatacacgttttcacctgatttattggaaggcatatgaaaaaatgtgcagtccacaaacaattgtaatttccaaatttaccacaattgcattatttcttcattctgcatgatgtcctggaacagagttacatttttcatgggtattgtttcatggattgaggacatgaatttcacacctgcctttttagccatgtgcagagaccttgagtagagcatgtctggacctcatctacactatctctcatgccccaagggaaagagtggagacttgactgactgcaaactttggggtgggagctgctcctgcacacctcagaggctgcagagaccccaagtgcagttttattgagttggggtgtctttctatgtgggggaattatgggctgccccactcctggtgattgctggtcagctctaaagacgggttcagaatgaggtcacctggtaacctttctcactgcagctccattatgtaaattaccactaccagattccaggtaataatgcaagctctatttttgcgacctcattttcttatcttttttgttcataagtttggttatagaaaatgttaccacctagtttcctgattcaaatcctataatttgctgaactactcaggatgttttttaatgtgcccagtatttgggaaatataaatgaacagccatgtgtggttcactgagtggacatagtcagttaagtacattagtaaaaacatgattgctgaattgtatagtgaaactacaattagatttgcagaaaattgcctccagtaatgtctgaagggagagccacccagccaatcccgtctctgggcttggaggaagctcactacacaggccaggtcacatgggtgatatccaaggtgcagctcccagcgttactgtgctattttccaggaaccagacatacaacttggcatctcagaagaagatctccaagatttcctttacctggacttcatgggcagcacaggaccagcaggagatgctcagaactcacccaaggcagaaccccagggaagagcaggtgcggagaggaaccagccagggaacctctgaccaccatctagggttgccttcttttccttcacagcatggagccctcaggagaccacccactaggttgtctgtaactcacgtccttcttgtcttgaagcaaaacagacataaatatgaatttgcagttagccccttgaacctgggtcaattttttctgagaatgccaacttaatcgtcaacatcatgggcattatatcaaaatcgagatggatatttagtcaccaggaagacagtttgtctcatggtagaagtgcttattcaattaaaaattacattttaatgaaaaggtctctaagtgaggactgttcaaataataaagtattagtgaagtatcagaaaaataaatggcaccattatctttggtatccagttaatctataaagcatatcaatattcatgttgtaagtggcctaggacaagttatggcagtatttaggctataaggagacattgctttccttcttagataggaatgtccttttttatcatactttaagttctggggtacatgtgcagaatgtgcatgtttgttacataggtatacaagtgccatggtggtttgctgcactcatcaacccgtcatcgacattaggtattactcctaatgctatccctcccctagccccccaccccccaacaggccccagtgtgtgatgttcccctccctgtgtccatgtgttctcattcttcaactcccacttatgagtgagaacatgcagtgtttggttttctgttcctgtgttagtttgctgagaatgatggtttccagcttcatcaatgtccctgcaaaggacatgaacaggaaattccttctaaatgaactgtgttttgacaaatattatccagtgactcttcctacatggggtttctacatgatctatttttcttttccaaaaacaaatcactcaagtttctcatctcctgagtgagaaaaattttccccaaacacaatctcagtctaggtagacaccttcatgaatgagccttcattctcagacaggcacacactgtccccatgtggatgcttctctcagacaggcacacatatccccacatggttgggatcatctgctgggactttgccccatggggatctctattatcactggggcaagttagcacctcgatcctcatccacactgtggcctttgatgtctgtgacctgccacaccctgtctgtccctcagtgtctagaatggtgaagtagtccaccccagggatggaggaagatcccagattttcctgtgaaggagacagaatgccaatcacagagatggaaatctctcacatccctcctgggtcatattctgggcagggtctctgaagtcacccctggatcagtgtcctaagatgtctccctctatttccttgggaagaacccatagaaagacaaataagtttttctattagggcatcgtagaacttgtgctttcttgtgtgacaaatataggtattttgactattttaaaaattagatataatattaagtctaccaaatatgtaaatatataagctttataatgtatccctagagggatgtctcctggaattgagaattgaatatatatatatatatatatatatatatattccaagataaatcttggtgaacattataaaattgactctaatatttatgttcaagatgatcatttcaaaaaagttttaacaacagagaccagatgtatctttccaccagaaataactgtaaaacacagtgaaattttttaaacatgattttaaggtattttacatcaaataacaaggacagtgattgctgaggtggggaaaatatacaaaaggagccctctgatgaacgcatgctttgctactttttaaagagagtttccaggccacagtgctgaagaggaaccaggtagatttgaagttgaggaaaaggagctgagatcccagacaggccaagaagtgtggagatcacagactagacagtggatagcagaacactgttcagagagtgagccccgtagatggccggagagagacccagccttggtagagtgtggatcagtgtatgggaaccctggaaagttgtacatgagaacacaccttactctagggggcttgccttaaaatctaaaattaccctaaaatttaaacataatcagttacaaattttaaaacataaagaaagacaccatgttaaagaaagataaaggaaaggtggatttgcaatattaaaatataaaaagtgtatttctgaacaaatgataatactgatgaggggggacaagtttattccatcacggcaaatgatttaagagaagaacattccaaatgcttatggccctaatgaggaagcttcaatcacgaatataaatagagttatctcattaccagtgtgatggtgtgagaaacttcaagatttccaaagagacaacctaatctggtaaaaattatagaaacccaacctgtactatcaaggaaaattattctgagaacacacagtaaatgaaatccattgactgacataaagtcctcctgttgactgaagggttatgaccccccacaaggcatatgttggaatctcaactccatcgtgacggtggcaggaggtggggcctttggtctcctttgaaaggtgttgaggctccgtttcatgaatggaatcagcgtcctgatacaataccccagagagctccctctttccttccaccaggtgtggtcacagtaggaaggtggcaatctataaataaagaattgggacatcaccagataccaatctttaagtcatctttatcttgaacttcccagccttgaaaattgggacaaatgcatttatgttatttctgagccacccagtccatgatatcctcttatagcaactcaaacagtcttagcaagtgcagtgaggatcacaatacttgagagaagagcattacctcttctttacatctcaggatcacagaatcttgaccttgggctgaactgacaagaaggtggtgcttccctctcccccagatctcagttgaggtcatgatgtcagatctttatggtggagactaaattcctgcctgtgatttgatggatgcctttctcctcccagcctcactcacaagacatagtttccatgtcaggtgttatagaccaagaacaggtggaccccgattattctcaccccagctcacttgtagggcagaggttctgggagcttcctgggagaggaacagtgagatcatacaagtccatcacttccatgcagttttctgtacttaaagcaggagtgtccttctgagctgcttgaaccctttcttctgcaccaaggtagagacttccatgtttttctagtgatacagtcagggcataaaaacagtgatagaaagctctctctaaagggcgtgaccagatttgcagtagaatgagaatagtttcaaccctaaagttcatctaaaatgttagtggttttcatggtaagtaattaatagaaacctgacagctccatgacagcaatatagaaatcaatagtccactcattttaacagagagaattagaaaacctataatttaagaataaccagctgggcactgtggctctgcctgcagttgaatttacttgggagtttgaggtgagaggatcacttgagcccaggatttcaagcgcagcctggaaacatagctagacttaatttcttgaaaaaaatcagtgctattttggggtcagaacaatcctcaaaaatggtccccggaaagaagcccaaatttaattgcaccagattgttgaacgatttatgctacaaaacagtgtcacatgtcagaaatgagcacagtgtaacatctacatggtttgttaagagacacaaatggtcaagtagaacaatcaggtaattaggctgtcgaaggcaacactgccaaatgacagcatttccgtggaaactgcgtgtacatccaggactgcacctgtgaacgatgacatcatacccttcacagtgtcgaggaaagagacatcactcaaacagacaagccaagggacttcagaaaatataaggggaaatacagtgtgcaaatatgtaaaaaatgcaataagatgattactcctaaatgaatatcaagacacaatcacataatatgaaattaaattttcctgaatgataggattactaccaatcaccccccaggacaccctcatctactctgtgcacagccttctcgtcaggcgtcccagcccagaccttgctatgtagcagaagacatgcaaataagacccccctttttgctgatgaaaagcagcccagccctgaccctgcagctctgggagaggagctccagccttgggattcccagctgtctccactcggtgatcggcactgaatacaggagactcaccatggagtttgggctgagctgggttttccttgttgctattttaaaaggtgattcatggggaactagagatactgagtgtgagtggacatgagtgagagaaacagtggacgtgtgtggcactttctgaccagggtgtctctgtgtttgcaggtgtccagtgtgaggtgcagctggtggagtccgggggaggcttggtccagcctggggggtccctgaaactctcctgtgcagcctctgggttcaccttcagtggctctgctatgcactgggtccgccaggcttccgggaaagggctggagtgggttggccgtattagaagcaaagctaacagttacgcgacagcatatgctgcgtcggtgaaaggcaggttcaccatctccagagatgattcaaagaacacggcgtatctgcaaatgaacagcctgaaaaccgaggacacggccgtgtattactgtactagacacacagtgaggggaggtcagtgtgagcccggacacaaacctccctgcaggggcgcgcggggctaccagggggcgctcgggactcactgagggcgggacaggtcccaggaacaggtgcagcggtaggttttctttctcctcagctggagaagtcaggtttgtgttttcagaactctggagtcttacaggttgctacattttcatacagttattagtatgtatttattatcattggtatttaagttttaataattttaaaccttttatgtagtgttattttttaaaactgtttactttcatttgcagttattcttccagagtttcattaacatctattgctatgagcaactacatagctatgagagcataaatttacacctgtagacgtaggtctaaatgccacaaacctgtgcataaatgtatagtgacttatatttaacattataataagataatttttaaaatatatcctaaacgatcaaacttactgatgaactaaatataaattatcagagtaatgcataattgatttcaataattttatattgtttatattaattaatatctatttctttactgaaacataatatattggtcatttcaaaatagctacgatacatttcaaatggccttgatgctaataatgaaaagattttgaggtgattaatatgctaattagttatatttaattattccatattgtattaatatatcaaaacattgctttgtacctcataaatagatacagtcgtaatttgtcaattttcaagacagttatttaatccatcctgggtcataatctttttttcccctgtccatggctgattggattgtcctgataaacccatccatacgcctgcctcccgcaggcttctgagacgggctccatgaaggccagaagcaggcaccctgtgagagtccacacgacctggagcctccctctccttggattaggccatctcctcgggatcgcagggctcttcattatcctcacccccttgttgtaccaaacaagcaacatcacactttaattcatcacgctttgctttaattttccccccaaaaatcaaggtaataattttagcaataaacatcacaacctactatgagtaagtcctttccaacgtactaaggtttcttctgaggactttacatgtattacacagtttaaatttctttatgaaatgagataccaatatctctatattagagattgtttttctaagtcgtttctgacaattaatttgtccaagggcctgtaaggattctgttagaaatccaggataaaatttgaaatttcagcagtaatatctggaaaaacattgagactatatttaacttcgtacacgtgctctcaaatatccttatttccctaaaggttgttctcagttattattttacacatgatatctataattaatactaataacacaggttaaaatattatctcaattatttaacgacttttgataataacaaaatacatattccacatatttttgaccagtttgttttctctatgaaacacgtgtttattaacttattattatcagatgtcacccttatctttctgatttctgggatttaattctagcaggtatcgtttagtatattttattaattcatattatattgttcacattttcagtatgattttattatttgcattgtttattgaatttgaaactttcttacataatttttttaattttttattttcatgagatgtaatttcaatataagtaataatgcatagatctgcaatgtaccattacaggatttctggcaaatgtaaacacacttgtccccaacagccaaggttggatgtagaggaggcccattcccccagcacaagcgaccttctctgtgcttccagtcagctcccacatttaacacaatgttttgatttctgccactgtagattcactgttcatgttttgattttcatataaatggattcaaacattatagaccccttttctggtaaggggctacttttgttatttttgacgtttatttatgctatttcatatgtaaaattgcatctgtatattgtcatttattcacttaacagactgcctctgatataaaatctcaaagttttgatatatatggataaagagagagggagagagagagagggagaaattttatacttgagtcagtgcatttaacaataaacgacagtaagctgatccatttccctgtcaatgcacttttaatttgtttctggtttattaacatcataagcaaagctgctgcacatattttttgtttttctatttaccttttctcatttttattgagaaagtatgtggaaatatccatttcttcatcataaaagtaaacttcatttgttcagctttatggaactataattgacaataaaattgtatatatttgaggtgcaccacttgatattttggtataaattgtgaaattttcactatgaccaaggagttagcatgtctgttaccctacatttgccattttcttcctttaatttatatgtgtgtgtccaatgagagcacctgagatctatccctttaccagagatcaagtttgcaatacagtgttgatagctatagtcccattgctttacattagacctccagaacccattcaacctgcacaactgaaactttatgcccttgacaagaatcattctatttccactcctcccagccctgggaaccacttttctactctctgcttctaagaatttgaatattttagattccccatataaatgagataatgcagcatttgtctttctgtgtctggcttattccacttagcataatgttctccaggcccatccatgttgttggaaatgttataatttccttatttttagaggtcacataatattccattgtatgtgtatacatttgctttatacacccatttacctacggtcactaactttaaaaaaattctaggccattatgaataatcttgtaataaacatattttttacttactgattttatttcctttgaatacgcagccagaagtgggatcaccagatcacgtaatagttttactttcaatttataaaataacttttactaccactccactgaataattctcttttcaccagctaactgtcagcattttgttatcttttgtgtctgtgataatagtcatggtaatgaacgtgaggtgatatctcattgtggttttgatttggattcccctgatgattagcaatgtggaacacctttccatgtcctgctggccatgcatatgtcttcccttgaatacaatgtctatgtacagttttgccctcttaaaaatcaggggttttttttgctattgtatgggttctttacacatttagatagatccctttgtcagatatatagcttcaagtaatttatttgtctatgattttggtgtcgaatccaaataaatcattttccagatcaactctggaaagcttcttttttccctgttttcttctatgagtttacaattttagatatcatattatatccaagccttgagtacatttttaggtgatttttgtatatgagatgagatgaggtctcatttttttctgcatatggatgctcagtttttacaccatttgttaaaaaggcaatcttttccttattgtgtgtccttggaacaaaaaatctgggagatacacaaaagaggaaaatcttagaccaatattcctgatgatagacctaaaaatcttcaagaaaatactaggaaattgaatatagcagcacattaaaaagttattacattatgatccagtagattttactcctttcatgcaaggctagttcaacatacacaaatcaataaaggtgctccaccacataagcagaatcaaaagcaaaaactatataattatctcaatagatccagagaaactttcaataagattcaacattcttcatgataaaaaccttcaacagactagacatcaaagaaacttagcttaaaatgataagagccatgtatgacaaacccacaactgacaccatactgaatcaacaaaagctcaaatcattccccttcataactggaacaaaacaagaatacccactctcaccactcctattcaacatagtagtggatgttctagccagagaaatcaaacaagagaaagaaataaaaggcatccccacaagtaaataagaattcaaactatctatttttgctgttgataggatcctatgcatagaaaattctatagactctgccaaaagaatcctagaattgataaacaactttagtaatgtttcaggatacagaataaatatacgaaaatcagtagcttttttatacaccaacgacatccaggcatagagaaaaataaatgacacgatcccacttacaacatctacaaaaaaagaaatacctaggaatacagctaaccaaggaggtgaaagatctctacaagaagaactacaacctctccagcacatgttgtttcctgactttttaatgatcgccattctagctggtgtgagatggtatctcattgtggttttgatttgcatttctctgatggcgagtgatgatgagcagtttttcatgtgtctgttgactgcataaatgtcttctttcgagaagtgtctgttcatatccttcacccactttttgatggggttgtttgtttttttcttgtaaatttgtttgagttcattgtagattctggacattagccctttgtcagatgagtagattgcaaacattttctcccattcgttaggttgcttgttcactctgttggtagtttcttttgctgtgcagaagctctttagtttaattagatcccatttgtcaattttggcttgtgttgccattgcttttggtgttttagacatgaagtccttgcccatgcttatgtcctgaatggtattgcctagattttcttctagggtttctatggttttaggtctaacatttaagtttttaatccatcttgaattaatttttctataaggtgtaaggaagagatccagtttcagctttctacatatggctagccagttttcccagcaccatttattaaatagggaatcctttccccatttcttgtttttgtcaggtttgtcaaagatcagatagttgtagatatgtggcattatttctgagggctctgttctgttccattggtctatatctctggtttggtaccagtaccatgctgttttggttactgtagccttggaaacaacaggtaacaacaggtgctggagaggatgtggagaaataggaacacttttacactgttggtgggactgtaaactagttcaaacattgtggaagtcagtatggcaatttctcagggatctagaactagaaataccatttgacccagccattccattactgggtatataccaaaaggattataaaccatgctgctataaaaacacatgcacacgtatgtttattgtggcactattcacaatagcaaagacttggaaccaactcagatgtccaacaatgatagactggattaagaaaatgtggcacatatacaccatggaatactatgcagccataaaagatgatgagttcacgtcctttgtagggacatggatgaagctggaaaccatcattctcagcaaactatcgcaaggacaaaaaaccaaacaccgcatattctcactcataggtgagaattgaacaatgagaacacatggacacaggaaggggaacatcacacaccggggcctgttgtggggtggggggaggagggagggatagcattaggagatacacgtaatgctaaatgatgagttaatgggtgcagcagaccaacatggcacatgtatacatatgtaacacacctgcacattgtgcacatgtaccctaaaacttaaagtataattaaaaaaaacaattacaacgaaaatccttaatgtctcttgagtaggtagagaacatatattttatctaagtaacttgctctaaactgcaaaccaaaataagatgattcaataaagtattttgtaaactagtctttagcaaaaaaaaaaaaagaactacaaaacactgcagaaagaaatcagaaagtaaacaaataaattgaaaaaaaaattccatgctcatggaatgggagaaataatattgcaaaaatggcaatattatccttcaatatttatcgattcaatgttattatcaaaataccagttttattcttctagaaatataagaaaagtattctaaaatttgtatgtaaccaaaaaagaacaaaaacagccaaagtaatcctcagccaaaagaacaatgccagggacatcacactatttgacttcaaactctactataaagccacagtaacaaaaactgtttggtacttgtacaagaataaacacatagacaaatgaaatagaatagaaaactcagaaataaagctgcacacccacaaccatctgttttttgacaaccctgaaaaaaataaacaagcaatggggaaaagacaacctagtcaataaatggtgctgggataacttgctagccatatgcagaagatgggaacttgactcgtgactatcaccatatgaaaaagaaaattaactcaaaatggattatagctttaactaagacttcaaactacaaaaagctaggaagacaacctaggaatactcttctctgcattggccttggcaaagaattactggctctgagaccaggcattttttgtaacagtgatttattttctggggtacatatcatggagtgggattgctgattgaacgatagatctattttagttgcttgataagcctttacaatttttttcacataggttgcactaatttacattaccaacaacagtgtataaatgcattttctctgaattctcatccatatctataattttttgacttcataataataggcactttgactgatgtaaagttgtgtctcactgttgttttaatattaatttatctaatgattaatgttgttcagctttttatttccatatgctttttggccatttgaatatcttcttcacaaaatgtctgttgatgtcttttgcccacattttaatggtgtaatttatttatttgttgttgttgctgagttgtctgtgttcttgttagattctagatgttagttatttattgcacagtaatgtaataaatctaaaagtcaggaaacaacaggtgctggagaggatgtggagaaataggaacacttttacactgttggtgggactgtaaactagttcaaccattgtggaagtcagtgtggcgattcctcagggatctagaactagaaatatcatttgacccagcaatcccattactgagtatataccatcccatgactgggtatatacccaaaggattataaatcatgctgctataaagacacatgcacacgtatgtttattgtagcactattcacaatagcaaagacttggaaccaacccaagtgtccaacaatgaatagactggattaagaaaatgtggcacatataccccatggaatactatgcagccataaaagatgatgagttcacgtcctttgtagggacatggatgaagctggaaaccatcactctcagcaaactatcgcaaggacaaaaaaccaaacaccgcatgttctcactcataggtgggaattgaacaatgagagcacatggacacaggaaggggaacatcacacactggggcctgttgtggggttggaggggcggtggggagggatagcattaggagaaatacctaatgttaaatgatgagttaatgggtgcagcacaccaacatggcacacatatacatatgcaacaaacctgcacattgtgcacacataccctaaaacttaaagtgtaataaaaaaaataaaattaaaaaaatcaattgcaaaaaaactgttgaaactatgaaaatatgaggtaattaaacaacacaattttgaccaatcattggctcaccaataaaattaagatattaatttttaaaaatacaaagaaaaatgaagccacaacataccaaaccctctgagatacaggaagagcagtactaagagcttatagttctaaatgtctatgaaaaaatagaaagattataaactagcaatctattgatttacttcaaggaactagatattttagaacaaaccaaccccagagctagaagaagaaaataaataaagatcatggcagatttcaaaaatattgaaacaaaaaagcaaaatataaggaatcaacaaaacaaaatgtggttattttaaaacatgaacacaattgatagagcactaactaggtcaacaaaaaaaaaaaacagaagattcaagttagcacaagcagaaatgataaaggtggtattataactgacccaatggaaatacaaaagattatcaagacatactgaatatgtctatgctcacaaactagaaaatctagaggaaatcaataaatttctggaaatattcaactaccccccaaaattgaaccaggaaggaaaagaaatcctaaatagaccaatgcgagtaataagactgaatcagaaactgaaaatctcccaaccccaaaagcccagaaccagataaattcaaggtctaattttaccagatgtaccattcttactggaactattccaaaggattaaagagaagagattctttcccacctttgtctaaaatactcgtatcacctaataccaaaatcaggcaaggatacaactacaacaacaaaaagctacagggaaatatccctaatgaacatagatacaaaatagtaaacagaatactagctagctgaaaccaacagcacaataaaagataatacatcatgaccaattgggttttattccagggatgcaaagcttgtctaaaataaacacatcaataaatatgattcaacatataacataattaaaaacagaaaacataagaccatctcaatgaatgcaaaaaagtcattcaataaaattcaatatcccttcatgaaaaattcctcaacaagcttagcatcaaagaaacctacctcaaaactataaaagccacatacaacaaccaacaaaaaactcttaaataaatcaatagaacagggatcttcttaaatttagtaaaaacctatgcaactgatttattcaatatgctggacttggtagtgaagaaatgaatgactttaactaaaaaaaaaagccacatataacaaaacaacattatatggaatgagaaaaagttgcaaaaatattcctgaagaacgtgagcaagaatgcacactttcaccactcctactggacgtattactgaaagtcctagccagaataatcagaaaggaaaaaagaaatgtatgtttcaagttccaagctaaggaatccaggagtggcagacccagagacttgttttttaatctatgaataacatccaaacccctgaccgatcccttggaacacaggatttaggggtgattgaggctctttcttttgggttaaatgaaagttgctaggtggagggtgttaagtaaaaattactacataagctgcatagttttgtcaaatggttgtagttttcttgtccagcctgctgttcctgaaccaccctatatgaaagccctcaataaactatatgtcttgttcactggtttggcctgttgtacacgatgccagtcctattggagtccatattggtctggcgtgacatccagtcaacctggtaaaaggtccaaaaaaaatctcatgagcacccagacaatggaatctaaaaagaggagacccctgcagaaaccttgggcaggctgttaatttctacgtggggcccaacagccgttatccatgatggatggggcccagtgcctgagtatggggataccgccacaatgccaaaagttctggaagaacctcttcagtgggtgcatcttacaaagtgaaagtcagatgtccaggctgttgcattatcaggtgagtggttcttcctgactgcactctgagaagccactgagacagtgctcactgtgtatgctacagtgtgtcagtcacaagaagagctactcctagaaaaacatgccagactagctcagactaatcagagacctttctgtcctgcctgtggaagcagaatggcaaattggggaccgccgcttgtggagcagcacatttgaaggatttctggccatcacatgaattagttacggctgtgatgactaaactgtcatgggaccctaagacctagttcccataaagagttctagggggaggaggatgaagtttggggtaagcccatgggggttcctgtcctctctacacatctggtggctaccaccaaggtaaaaatgggccaactgcaccagcagaggcgagccccagagacatttcccacctgaaataaggaaacacaccacaatgtgggattccaccactgcggaattgctgacacttagaaatgggttcagacagaagaagagagagttgatcacagggtggcttcttcatctgtgaggcatgcgggaggagggcattatactccctgaactcaagattagtaaagtgacatccatcacaaaccatctgggcctgaggcagcacctcgatggtgtcagtcatggagattggaccatccctctccttagctgggtggttgcagactgcaagggaccctggtgaaacgagggagatgtccgctttattagtgtgttctcgtattgctagaaagaaatacctgaaactgagtaattcacatagaaaataggtttaatttactcatgattctgctggctgtatgggaagcatgatgaaaaatctgttcagcttctggagaggcctcaggaaatttacaatgatagtgaaaggcaaaaggggagcagccactttatatggtgggagcaggagcaaagaaagagtgagggtggaggtcccacacactgttaaacaaccaaatctcatgagaactcatttactatcatagcaaggggaccgtgctaaccattattcataaatccggacccacgatacaaccaccgggccccgcctcaaacattagggaagcaaaatcacatacagttgttatgacaggtgggacatcctgaaaacctctctaggcatgtcccacacggccctggagctgtctcaggggagcagtctcctccagtgtttagacgcacaggcacggataatagggctaagtctggccagatgtgtgatattcaacacattgcacaactgctctgttctgtatgtaatttatcttctctacaaatgtaacattgatggttgcattaaatatattctgcaaatatgtaaaaataaaataagatgatgattgctaaatgattatcaaggcacaatcacataatccgaagttacaatttcctgagagataggattactgcccatgcttaccaggacactcacatctgctctgggcactgccttctcctcaggcgtcccaccccagagcttgctatatagtaggagacatgcaaatagggtcctccctctgctgatgaaaaccagcccagccctgaccctgcagctctgagagcggagccccagccccagaattcccaggtgttttcatttggtgatcagcactgaacacagaggactcaccatggagtttgggctgagctgggttttccttgttgttattttacaaggtgatttatggagaactagagatgttaagtgtgagtggacgtgagtgagagaaacagtggatttgtgtgacagtttctgaccagggtgtctctgtgtttgcaggtgtccagtgtgaggtgcagctggtggagtctgggggaggcttggtccagcctggagggtccctgagactctcctgtgcagcctctggattcaccttcagtgaccactacatggactgggtccgccaggctccagggaaggggctggagtgggttggccgtactagaaacaaagctaacagttacaccacagaatacgccgcgtctgtgaaaggcagattcaccatctcaagagatgattcaaagaactcactgtatctgcaaatgaacagcctgaaaaccgaggacacggccgtgtattactgtgctagagacacagcgaggggaggtcagtgtgagcccggacacaaacctccctgcaggggcgcgtggggccaacagggggcggtcgggaaccactgaggacgggacaggtcccaggagcaggtgcagggggcggtttcctgtcagctgcaggaggcgggtttgtttttgcaggactctggagccttatgaggttgcactattttattatggttatttatcatgtgttttttattgatatttgtgttttagtaatttttacatttatatgtaggggtattttttaaaaatacataacttcaagaaataattcttcctagtaatttacacctattcctctaaagttttattaacacctgttgatatcagcaactacatagctatgcaacattaatttacatctataaacatatgtgtgaatacatgaaactatgcatacatgtgtagtcatttatatttaacattataataaaataataaattaaataaaataattgaattaaattaaaagaattaaacttaatgatgaactaaatataaattagagtaatccataattgatttcaatccttctctatggtttacataaatcgatgtctacttgtaagcttaagtatagtgaattggtcattttaaaatagccaagaacaaatttcaaatgttcttgtcaccaaaaaatgataaggatttgaagatttgaggtgatatatatgtcaattagctcgattcaattattccacattgcattcataaatcataacatagctttgtaccccatcagtatatggggtacaaccaaaatttctcaatttccaatgaaattttaattatatattttttaatttgatgcctctctttggatcaggccacctcctcaggattacagtgctgttcagttttctcaacatgctgttgtaccagataagcacaaaacatttaatttcattatgctttgctttagtttttcaaaacaacataaaggtaataattttcccaacaaacatattacagcctattctatacttttttattttttgtttttatgagataaaatttacatgtaagaaaaaatttatagatctgaaatgtgtcactagagagtttctggcaaatgtgaatacccttgtcccgaacacctaaggtagactaaagagcaagtccatacccacaacatgcgtctttctctgtgcctgcggtcaacccctacatggggaagtgttttgatttctgacaccatagatccatttttttctgttttgagctttatataaatggaatcaaacattatagacctttttttggtaagggactactttgctattttttaggttaattcatgctatttaatgtatgaaattagatcatcatagtgtcatttactcaattaatgggctgactctgatatgaaacctcaaagtattcatgtatatatggagagagagagagggaggaaggacagagattttatatctgagacagtccattgagtaaatatatgacaatatattgatctatttgttgtcgatggattttacatttgtttccagtatatgaatattataagcaaagctgttacaaatacattagtgtaagtttctctatctatgttgtctcaattttgttgagaaaatatgaagtatgtttttctctattgtaagaggaagtttaatttttttcagttttattgaggtaaaaataaaatattttttaaaatgtataggtttaaggtgccccacttgacgttttgatgttgtattagtccattctcacactgctataaaaaatgcctgagactgagtaatttgaaaaaaaatatgtttaattggctcacggttctgcaggctgtacaggaagtgcagtggcttctccttctggggagagtcaggaaagttaggatcatggcagaagacaaaggggagcaggtgtgtcacatggccagagcggaagccacaggaagcggaccggggtgtggggggactgcacactgttagacaactagatcttgtgagaactcaggcactgtagtgagaacagcaccaggagtcggtgctgaaccactcatgaaagacccaccccacgacccagtcatctcccaccaggtcccaccccaggactgaggattataatataacatgagatttggtccaagacacagatccaaaccatatcatatgcacattgtgaaatgctcatcatggttaaggtaatttgtatattcatcttctcactattttttgtttgatttttgagacagagttttgctcttgtcgtccaggctggagttcaatgtcaccatctcagctcactgcaacctccaacccctggattcaagggattctcctgcctcagcttcccgagtagctgggattacaggagctcaacaccacaccccgctatttttttttttttttggtacttttagtaaagacagagtttcgccacgttggccaggctggcctcgaacagctgacctcaagagatctgtccgcctcggcctcccaaagtgctgggattacagatgcaagccacagcgcccagccaattttattattttaaaaatgtactgcatgtgagtgtgtgcgtgtgtgtgtgtttcatgagaacacctaagatctacccttttagcaaaaatcacttttacagtacagtattaaatacaggaaaattggcgtaggttagatctccagaactcattcaccctgcacagctgaaactctgtaccctctgaccaacttcacccaatttccctctcctcccaggtcctgggacccactattctactctctgctttcaagagcttgaatatttcagatcccacacgtaaatgagatcatgcagcatttgtctttctgcatctggcttattccactcagcgtcatgtcctccaggcccatccatgttgcaaaagccagaacttccttcttttcaaagctaaataaaattcagttttatgtgtacacattttctttaaacattctttaatctatggtcattaaactctttcacaaatctacactattataaataatctggcagtgaacatgtgtttaacataataattttatttcatttgaatatataacaagaagtgggatcaccagatcgtacgataactttatttttcaatttattgagtaacaagtcctaccacaccatatcatgatttcctttcccaacattcttgtgaacacttgttatattttgtcttgctgataatagtcattttaagtggtttgaggcaatatttcatcgtgctttagatttgaatttctctgaaaattagtaatgttgggaacctttttaggctctgtttttcatgagtgggttttctgaaaaaaagtctatccaggttttttcccttttatcaggtcgtttgtaatttgcacatagttttttttcctgtgcttttggtattaaattcaaataaatcatttctgaatcaatgacaggaagtttttccatgctgtctatgagtttgtggtttcaggttttgctcatttttagttgatttttgtacatggtgtgagagaaggtctaattttatttcttctgcatatggatgtccagttatacatcatttattgaggagactgtctttcttcactgtgtctttttggcatacaaaatcaggaagagacataattaaaaaagaaaatattagatgaatattcgtgatgaacatagacctaaaagttctcaacaaaatattagcaaatagaatccagaagcactttaaaatgtaacacatcatgatcaagtgggctttaccctgggatgcaaagttcattcaacatccacaaatcaataactgtgattcattgtgtaagcagaataaaagcaaaaaccatatgttatctcaatagatgctgagaaagcttttgatatgctccaacactcactcataataaaaaccctcagcaaactaggcatcaaaaaacatacctcaaaataataagagccatctatgaccaacccacagtcaacattatactgagtgagcaaaagctcaaaccccatgagaattggaacaagacaaggatgccctctcaccactcctattgaacatagcactgaaaatcctagtcagggcaaccaggcaatagcgaaaataaaacgcagccgatatggtttgtactagtgccccattcaaatttcatgtcaaattgtaattcccagggttggggctggggtctggtgaagggtgattctatcatgaggatgggtctccgtctcttgtgctgctctcgtgatggtcctcaggagatctggtttcaaagtatgtgtcatctccctcctctctcttcctcctgctcctgccctgtaagacatgatgcttccctttctgtcatgattgtcatgttcctgaggcccccccaagagccataattcctgtacagcctgcagaaccataagacaattaaaaacctttatacattacacagtctcaggtgtttctttagagtgtgcgaatggactaatacagaatcaaaataggaaaagaagtcaatgtatctgtccaaattgatgatataattctatacctagaaaattctaaagactctgccaaaataattctagaatagataaacaactttggtaaagtgtcgggatacaaaatcaatgtacaaaaatcactagcatttgtgtaccccaactacatccaagctgagagtgaaatcaagaacacaattctatcccacttacaatatccacaaagaaaaggaaatgcctgggaacacagataacaaataagatggaagatccctgcaagatgaatgacaaaacacagcagaaataagtcataaatgacacaaaaaatgggaaaacatttcatgctcatgattggaataatcaatattgtaaaaattgtcatactgccaatagaaatttacagattcaatactattcacataaaactatcaccatcattcttcacagaattagaaaaaaaagtatatatattctaaaagttatatggaaccaaaaagcccctgagtagccaaagcaattctaagcagaaagaaccatgacagaggcaacatgatacctgactttaaactacaccataaagtcacagtaaccaaaacagcttggaagtggtacatgagcagacatgcagaaaaatggaacaagagagaaaacagaaataaacctgcacacataaaccatctgatatttgataaggctgacgaaaacaagcaatggggataaaactctgtattcactaaacggtgctgggataactggattctgtcagatatacagaatgcaaaagtgaaggaggctgggcagcttcgacttagatttcagaggatatgtagagggccctgcaggcccagcaggaggccggctgcagcagtgcagccaccacagacagcctctactaggacagtgccaaagatggggaaagagagggttggagccccaattcacaatccccactagggcattttacactaaagctgtgggaatgtggccacgaccctcaaggtccctgaatggtagaaccaaaggcagcttgcactctcagcctggaaaaacttctggtactcgactctaacctatgaatgcaggccaataagctgtgctcagctataaggatgaaaagcctgaggtttctgggactccttcaacccagggtgccctggttgaagtacatcaagtgaagcgagattattttgtagctttaagatttaatatctgcccagacaggctttaggtgtgtggggggcctattggccattcctttggacatttttttccttttgtattaacaatatttaaccaatatctgtggcagtcttgcatgttggaagtaaataactctttaaaacattttgccagctcatagctggagggaaattgccttaagactcggataagactttggaattttcagttggaggttgaccaagttaagacttttggaaactattaaaaaaaaaagatcattttgcaacctctgaaggacgtaagatcagggggcacaagagtgaaatgatatagtttagatgatggtcccctccaaatctcatggcgaaatgtgctccacaatatttgaggtggggccgactgggagattttgggacatggggaaaaatccttcaggaatggctcaataaccaccctatggcagtaggtgaattattcctgtattaactactgggagatctgattattaaaaggagtctgatgaccctcctcccctctcacgtccacccctcaccatatgacaccgcctgcttcccctttgccttccaccataactgtaagcttcctgaggccctcacaagaagcagatgctggtgccatgctcctcacacagcctgccgaactctaagccaaatgagcctcttttatttgtaaattacttggcctcaggcattaatttagagcaatgcaaaatagactaaaacacactgcccaaagcaatatacagagtcaatgcagtttccatcaaataaccaatataattaagtacattttttttaaatgtcctaaaatttatatggaagcaaaaaagagccttttgattccatataatagcaaaagccgtcctaagacaaggaaacaaagctgaaagccccacattccctgacttcaaattatactacacagttataggaagaaagacagcacggtactggtaccaaaacaaaacaaaaaatattagaccaggtgtgcctgtaatcccagcactttaggtggcagaagctggtggatcacctgaggtcaggagctcaagaccagcctgaccaacatggtgaacccctgtctctagtaaaaatatgaaaaactagccaggcctagtggcccatacctgtaatctcagctacatcggaagctgaggcaggagaatcacttaaacccgggaggtggaggtttcagtgagctgacatcttgccattgcactccagcctgggtgacaagagcaaaactccatctcaaaaaaaaaattaatgtaacagaatagagagcccagaaagaaagccaaatatctacaaccaactattctttgacaaaactgacaaaaatatacactggagaaatagtcctctattcagtaagtcgtgctgggaaaattggatggccactcatagaagaataaaaccaggcttctatctcaccacagacaaaaagtaactgaatatggattcaataattaaatgtataaactgaaactataaaaatacttgaagaaaatgtagggagaattctcgggacattggcctaggcagataaaatatgactaagacttcaaaagcaaatgcaacgaaaacaaaaatagatgaagaggacttagttgaactaaagatcttctgcagagaaaaagaaataatcaacatggtgaacaaacagcctacacaatggtagaaggtatcacttcatctcagttaagaaggctcttatcaaaaaagaaaaaaaacagccaggcgtggtggctcatgcctgtaatcccagcactttgcgaggccgaggcaggtggatcacttgagatcaggagtttaagaccaacttgtccaacatggcaaaaccctatccctcctaaaaatgcaaaaattagctgggcgtgttggccagcacctgtagccccagctactcggtaggttaaggcaagataatcgattgaacctgggagttggaggttgcagtgaggtgagatcacgccactacactccagcctgggtgacaggagtgaaactctgtctcaaaaagaaggaaggaaggaaggaaggaaggaaggaaggaaggaaggaaggaagggagggagggagggagggagggagggagggagggaggaagggaaagaaagaaagaaagaacgaaagaaagaaagaaagaaaaagaaattaagaaagaaaaaaattaagaaagaaaagaaagaaagaaaaagaaggaaagagagaaaaaagaaagagagagagaaaaaaggaaggaaggatggaaggacagaaggagggatagaaggaagaaaaggaaaggagaaagaaagaaaaaagagaaagagataaaaagaaataaagagagaaagaaagaaaactaacaaatgctggtaaggttggggagaaggtaaactagtacagtcagtcactatggagagcagcgtggaggtacctcaaaaaactacaaatacaactaccaaacgacccagcaattccactactgcaaatgtatccaaacgcatgaaaataattatatcagagatttcttactcccagtgtatatggcaggacctttcacaatggccaagatatgaaatcaaaccaggtgtcagagagcagatgaatggttaaagattatgtggtgcatatacatgatgagatgctcatcatccacaggaaaggaaatcctgttgtttttggcaatgaagacggaactggaggacattatgtgaaatgaaataaaccaggaacttcaagtaatacaccttgttttctcactcatacgtggaaggaaaaagaaaatttgtctcatagaaataaatagtagaacagaggatactagagtctgggaagtgcaggggaagagataggcagagatttgtgaaggaatacattagagttaggtgggaggaatagattataatgttctttaccactgtgggataaatgtatttaacaattatatgtagtttcaaacagttagaagaaggatattgagtgttcccaacaaaaagaaaatgtttcagatgacggatatattaattatccttatctgtcccctacacactgtttcacaacatcgctatgtacctcatgaatatttacaatcattatttgtctattaaaattatattagaaaacacaaaattcactggaagtaacataaatggaggctctgggatagacctggagataacggagggtctgggatacattacaggcctagcactcaatggtcagaggagctcccattagctttttgtatttgtagcactgagtaaatctaacatttctcagagcttccctttgcaatagagacgtgaggcctagggagatcttgcagatagtcagatatgcagagggaagaagcaggggtagagggttgctggcccattcaacaatagttggaatgataattacgcatgtagagaagccaacattgatttaaataagttgcatcactgaaagccatgaaaaaaaatccaaaggaaatctttaaataaaattgagagtgaaactgttttgggtgaagaaatgttcactgaagttaggtgtgccagtaaagctgttaagaactacagtaaccactggattggattcagctttgtctgaattcagtgtgattattactggctcaggcaggggtcagaaatcaacatggataggtggtagcaacacgaaaaagccagggaccagaaagattcacagccgaattttttcagatgtataaagaagtgttgctaccaatcctagtgtaactatttcccaaaaatgaggataaaggtctcctccctaaattattccatgaagccagcattattctgataacaaaacctggcagagacttaataaaaaaacatgactttagaccaatatacctgatgcaaaaatgctcaatgaaatactcacaaactgaatacagcagcacatcaaaaagcctaacctaccaacactttgttcctgggatgcaaggttggttcaacatatgcaaatcaggaaatgtgattcatcacataaacagaacgaaaaacaaaaaccatgttaaccggcagggcacggtgactcatgcctgtaatcccagcactttgggaggctgaggcgggcggatcataaggtcaggagctcgagaccatcctggttaacatggtgaaaccccgtctctactaaaaatacaaaaaaattagctgggcatggtggcgggctcctgtagtcccagctactcgggaggttgaggcaggagaatggcgtgagtccaggaggtggagcttgcagtgagccgagatcacgccactgcagttcagcctgggcgacagagtgagactctgtctcaaaaaaaaaaaaaaaaaagaaagaaaacgttaaccatagacacagaaaaggttttgaaaaaactttaagattctttcatgttaaaaaccatcaaccaggcatgaaggaatacaccacaaaatataagggccatctatgacaaactcacagccaacattatactgactgagcaaaacctggaagcattttcccctgaaaactagaacaagaaaaggacacccattctaaccactcctgttcatcattgtcatggaagtcccagccagagcatgcaggcaagagaaagaaataaaaagcatcaagtcaggaagagagggtgtcaaactatccctgcagatgaaatgatcacattcctgagtctgtagtttggtgactgacattaatttaaaatattgtcagtcatcattgtttaaatatttcttcttagcctttctctatttttttctatttcccattatgtgcatgttatacctctgtcactgtctcaccattcttgggtaagctgttcttcttttgtatatatgtgtgtgtgtgtatatatatatatgtatatatgtgtgtatatatgtatatatatatgtatatatatgtgtgtatatatgtatatatgtgtatatatgtatatatgtgtatatatgtgtgtgtgtgtgtctgtgtgtgtgtatatttgtatttgtgtgtttactgttctaacaatatattttttgtttttgcttttcagtttgggaaatttctattgagatagttttaagttcagatttttgtccgcagctatgccccatctacatataagtccattgaaagcattacttaattctgttacaaaattcttgatatctacttttttttccttttttggaatttgcttcattctacttgcatgacacagctgttccagcatgctgtctgcttaattcattacagaccttagcatattaatcacagtggtcttaaattctttgtttggtaattccaaactaaatggcatggctgaatctcattttgatgcttgttttgtcttgtcacactatgatatatttcttttagtatatatcatgatttttatagggagaaattatgtatcaggtgaaagaaactgctgtaaagaggcctttagtgatatcattgtaagttgtggagagaaacctgtttcataatcctctggccatggcttcatctaggaagcttaaggcctttgaaaataaatccttacatgaacgtgaaaagataagccacagatatggagaatttcctcacaaatcaaatatttggaaaaggacttttatcaggaataataaaaattaccttacagttgaatgacaaaaccacatgatctaattttaaaatagacaaagacctgtatagaaagaagcctcatctaaaaataaatataaaaagtgatcagcatgatttttaggtatatgtatgtttaatattcaaaaaatactatatcctgttagaatgggtaaaatacacattttagacagtaccaaatggtgatgaggaagttgaaaaacaggaacattcactccttgtgggtgggaaggggatgctgaagaggcacatacacaactacagttagtactttattgtatatttcagaatagctagaagataagatttagaatgttcttaacacaaagaagtaatcagtgatggaggtgagggatatcccaggtatctggatttgatcattgcagataacatgcttttatcaaaatatcatgcgtatcccttaaaggttttgaactgttatgtatctatataaattaaacatttttaaaaaaacggtgcaggggaatccagctaattgcagattcccattagatgggatgtgctgcataatctgtaaactaatcagagtctgtgggtttgtaaaggactttagaaatcaactggactacttgtttctaaagataagtctcgcaagtttaattattttcttaatgggtggcgattttgaacatagaagaaatgttaacagttgtttctcaagttttcttctagtttcagaagaaaaggtttgcagggaggaatctgggaccatctttcaagtctcaacttcaatgtgattatctcagtaaatattttctgatacccctgagcagggtaagtctcatatatgtcctagaaactgcaagtagaattctaggcaccccaactgactgaagggaacttttctcttcaacgaggagttccatggacactagaaaacctagtttaggccgtgtcagaaatggaggatcagaaatccctcattataccctcctccctttggaattcaagcacaagtaaccagcattttccttaaaacagatttaaggctcagaaaacagattccgtgtagcagtaaaacaccaaattctaacctgactcaagaatagcatcacatgacagagaaaaggccttggaaggaatcaaagtcttttaccctaaaatatatgtctttgacatatttttaaatcaccctgcacagttatctttttgcaagagaaatttacattctgtagagaatcgcttccctttgaaggtgtttgtgttatactgaggtatcgggggaaattcagccagatactgggagaaattcacccccgatatttcacgtagattcttttctattttccttaagtgtcagccggtctgagaaataaagggacaaagtacaaaagagagaaattttaaagctgggtgtctgggggagacatcacagttcggcaggttctgtgatgccccctgagccgcaaaaccagcaggtttttattagtgattttcaaaaggggagggagtgtacgaatagggtgtgggtcacagagatcactgcttcacaaggtaatagaatatcacaaggccaatggaggcagggcgagatcacaggaccacaggaccagggcgagattaaaattgctaatgaagtttcaggcacgcattgtcatcgataacatcttatcaggagacagggtttgagagcagacaaccggtctgaccaaaatttattaggcgggaatttcctcgtcctaataagcctgggagcgctacgggagactggggcttatttcatccccccgctgcgaccgtaaaggacagccgccccccgaagcggccattttagaggcgtttagagcgtttctgtcttctctcccagtttctacgagttcctccagtgcctgtaacacagagctgttagtggctttgcccctgcctgttaattctttggtcatgtaatggtggtgagggagctgggtctggatgcatttcagccacagctgctgttccacttccccacacagaaccatctcgggaggaagaggttggagatttttctgatgtgtcctcaatcctggcagaaaaggtttcaatagcaataggattccctcagttgtatgtcctctgataatttaaacaataacttctttattatactcaactctaaacggtctaaagagtatgtctaagttaaccctgcattcgcttatatgacatttgctctaccccagataaggtcatattctctttctgtttgttcctgcaagtcactgactttcacaagatgtaaggtcccttgtttgtcctataacatcaataatctgatgttttaaagaaaatatgctaatttgcagctcagtaagtttagttgtaaaaataatacatttttttctgagatgcctacatctccatgctgagttggagctttatttgtaacactcagaaactggaaataacaaaaatattaaggagctttataaatagtacgggcacactcattaactggaattctgttcctcattacaaggaacatattctttatacacaaccaaactactgactcacaagtaattgtgctgagcaagaagccacacaaatgaaatggaaactgtaaggtttcactttaaccaaattttgaaaaatagacctgaagtagcaaacatgagagactgactcagtgtagtgagcggaaaatgactgggaggcaggaattagaggaaactagggaaaccttgaagtgtaattcattgttatcttgattgttattttggatgcacaggtaagcacatgtgaaactgcattttttcctttggagacatggtcttgctttgtcatccaggctggagctcagtggtgagatcatagctctctgcagcctcagaccctgcgtctccaccaatcttcctccctctgccatacgtagctgggactactggtatgtaagacaatacttggcttcagtgcttattaaaatgcacactttaattaagcagtatttgttatacagcaatcatgcctcaataagagtattgcaaataagtggatagataatttgttcaataaagattgatggaaagatagatgctaacatgagaaaatgcatgacacccaagaaaataacactgtaggaaacatgcttttctttacaattgttaggtaatcacaacagagcatacacatcacaccatgttctcgttacagagaaaaggttctgcaaacctcactagctgcaacccctgtgtgctgggcttggttcagggagaagtcaggtccagtggtgagaagcacaggcccagataaccaagctcactctgaccgaatgtgagccctgggtacattgtacaacccatctgtgcttctgctggtaatttttcatctgtaacatggaaatgacattgatactatataccatgtttcctctgcatatgtaaaaataaaaggtgattggtgctaactttaaatatacacagtttatgtacattgattgcacctcaatacaacagttttaaatagatattacaacattataagttttataggtttaatattttatcacagaacaaactttcaataagaaaccacaatttccaaatgctatcaatatcacaaatctcccccaggacactctcacatgctctgagccccactctctcctcaggcgtcccatcccagagcttggcatgtagtaggagacatgcaaatagagccctccctcggcttatgaaaaccagcccagccctgaccctgcagcactggaagaggagccccagccctgggattttcaggtgttttcatttggtgatcaggactgaacacagaggactcaccatggagtcatggctgagctgggtttttcttgccgctattttaaaaggtaattcattgagaactattgaaattgagtgtgagtggataagagtgagagaaacagtggatttgtgtggcagtttctgaccagggtttctttttgtttgcaggtgtccagtgtgaggtgcagctggtggagtccgggggaggcttggtccagcctggggggtccctgagactctcctgtgcagcctctggattcaccttcagtgactactacatgagctgggtccgccaggctcccgggaaggggctggagtgggtaggtttcattagaaacaaagctaatggtgggacaacagaatagaccacgtctgtgaaaggcagattcacaatctcaagagatgattccaaaagcatcacctatctgcaaatgaacagcctgagagccgaggacacggccgtgtattactgtgcgagagacacagtgaggggaagtcagtgtgagcccggacacaaacctccctgcaggggtccccaggaccaccagggggcgccagggacactgtgcacggggctgtctccagggcaggtgcaggtgctgctgagggctggcttcctgtgatggtctggggctgcctcattgtcaaatttccccagggaacttctccagatttacaatcctgtactaacatttcatgtctctaaatgcaaaacttttttgttctttctgtatttttgtttttgtaacaggaggacacattctcgcctccacagaagccacagtgtcactttgggggcagatgatccttctgtagtcagcaggatgaaagtgcagaggaatctcagtggaacctgggaagtcttttccagttagactcagggcagagacctccatgggaatctctgattagaacaggctttgagttctgataggagccaagagagaggctcacccagggtcagagtccttaaaacctgacggttttcacagctatctcacctcgtcttgaaaaactgtgcacatctgactcacactaattcagttgaccttatttctgctaatctattttccttctctgcagacttgattctcacagttccctttcttcttctcttgcctgaaaacagaggatgtgttttctgtagtcaaaatcccagagatcaggtctgcaggacctgggtaggctgaggggactttctcactcaccatagcctggtgacactcctgctgtattttgtatgtggaggtgtttggaaaacgaagtgaacattagtcatgaagggaataatactagttttctccaaagggatgtggatgtagagctgatcttgtgcttctcacactgtcacagaatttatgctctcccctgtgactttaggagagctgaggatggacactccattgtgctgtgagctctggtaatagtaattatagggtctcgctaggcagcctaaggtcaatactgctggccttcgggaaaggcaggctgggattcctaggaaaacctgcatctgccatccagcatggagtcccatcgtcttctgttatgctctgattgaatcaggcacacctaggttatctagaacactcttcgtgacttgggaaaaattagtggcaggctctactaagacctgcattatgccatgggagcaacacctaggctagtgtgtgattgagtaggtgagactatggtctagtcaaggtgacagggaaaattgttgccattattatgttttattttatatttggcaatatagtcatgctcatattacaaatatctttctacattttttgtgtcagaagcttttgaacaagagcaacttcatcttgaatagaggctaggaaaaataagactgagacctgctgggctacattcccagtaagttaaggcgttcttagtcacagggatgagataggaggtctgcacacgatccaggttataaagaccttgctggtaaaggttacagtaaagaagctggccacagcccaccaaaaccaggatggcaaaaaagtgatctctgttcgtcctcactgctcattataatgccttaacatgctgaaagccactcccctcagcgccatgacggtttacacatgccatggcaacatcaggaaggttccctagatggtgtacaaaggaggggaggacacctcagcttcgggaattgcccagggactcatgaataatccatccgttgtgagaaatacattcatccctttgagagaaaatgcacagggggtggaatgaggctgggaagccgatggcacatggtggaagcctgtccctgagtgaaagagagggggaagctggattgggtggaaggtccctatatttctgtgctgtgcaagggaggggcaaaatataattgagtctcttgtaagtcagtgtttcctctcaggggatccccatgactcccagaaataatggctctgcttaggaatccctgcagagtcactcctttcattagagtagaccacaggacatgggcctcagcacacgccatgccacagatgtcagaaagcagctgctgggaacctgacccacctgcattttgctgcctgtaggaggaggaggacgtgcattctcagggccaacacactgtttttggatttttatagagaacacctgcttttactttattttttggaaaaatatatgaacaaatgtgcacctgcaaacaattgtaattttcacatttattttaattgcatttgtttataattgtgcatgaggtcctggtgcagagttgagtttttcatgggaattgttccaagaatcaagaacatccattttccactttcactggtttttccccatgtgcagagaccttgagtagagcacatctggcccttatccacactatctcttgtgtccccgggaaagacagggatttgcctgactgcagaatctagggtaggagtctgcacacgtctgagcctgcagagaagcccagtgaagtttaatgaagtcagagagctttcccgtgtggggaacctctagcttcctcactctcagagattgctggtcagctgtaattgaggggttaagaattagagcacctgggagcctgtctcatcacagctccattctgtaacttaccaccatcagactgcaggtaataactcaatcttgatttttctgaccccatcttattcatttgtaagtttggttatacaaaatgttacattttagtttctgattcaaacctcagaattttgtgaattcatcaggaataattaaaaatgtgtccagtttttgggaaatgtaaattaatgtccatactgtttatgtgtgtgtgcgtgtgtgtgtggggggatatgtcagtcacttacaccccagtaaaaatgattccttaattatatagtcgaactgcaattagatttgctgaaaattgtctacagtaatttctgtgaagctgaccttgccaccttgctgtgaggatgctcagtgcacaggtgaggtctcacaggagagatccaaggttcagcccccaggactggctgagctcctggcttggagccagacataggactgggcatctcagaagcagatcccctggccctcctttatctgggctgtatgggcagcagaggacaagcagaagaaactcagaattcagccaagacagagccccatttaggagcaggtgcatcaaggaaccagccagagaacctctgactacaatctagggttgtcttcttttgcttcacagcatccagtcctaaggagaccacccactatatcatctgtaactcagaactttcttgttacaaaggaaaacacaaatgaatataactctgcagttaacttcttgaacctggattgatgagtttccacggccttatgagcacagagaccacatccagtgcaggtgcagagcaaggctgcaacagtcagcctgctgctccctcaggagtcttccaattcccttgtccaaagcatccgctcattcatgggctgagaaaagggaagtcattcatgcagtctactctctccacagaactgacggggcacaaggacaacatcgatttttcatggaacatgcctctaggaatgcagctgtgtgcacacacactgctaagcacacacttctttacataattacttgtaactgtattttcttatttattctctccaatttttttacacaaattcatcacttttccccataatcaaagaggattttgatcagaatgcttgtggggagccccttgccccccagatgcccaccatcattattcttgaagggaggaggaacggcagctctcttgatttctactctaatcctctaggactaaaaccagaaggttgcatgtccggtgcgggagcatcgaagaagatcctgtctgtagaagcaggagcgtcaagacttgactgagagccatggtgctgaaatgagatagattccctgatggagagcacacgtggacccccacacctgagggctcactgctcctcaccacagatgcactcccctactgagtcctgagacctgagtgcaccccatagagtagggctcagatgaggggatgcaaatctccaccagctccaccctcccctgggttcaaaagacgaggacagggcctcgctcagtgaatcctgctctccaccatggacatactttgttccacgctcctgctactgactgtcccgtcctgtgagtgctgtggtcaggtagtacttcagaagcaaaaaatctattctctcctttgtgggcttcatcttcttatgtcttctccacaggggtcttatcccaggtcaccttgagggagtctggtcctgcgctggtgaaacccacacagaccctcacactgacctgcaccttctctgggttctcactcagcactagtggaatgtgtgtgagctggatccgtcagcccccagggaaggccctggagtggcttgcactcattgattgggatgatgataaatactacagcacatctctgaagaccaggctcaccatctccaaggacacctccaaaaaccaggtggtccttacaatgaccaacatggaccctgtggacacagccacgtattattgtgcacggataccacagagacacagcccagggcgcttcctgtacaagaacccaggtgtttttcagtggtgctccctccccacttctgcagaacaggatagtgtggctgagatgccatttcctgcccagggcgtgcgtttcccatccccatctgactcagagccttgttttcctcctttttctttactaataaatggcatgtcccctgttagtggttcatgcaagcagaagctgtatcctgtttgacaaagattcagcatgaaaggtcctgctacctaaaaaaaaatagacagatgagatttaattaacctaaataatttttttcacaacaacagagtgaatacgcaatttacagaatgacagaaaacttttgcacactttgcctgtgacagggaactaatatgaagaatttgcaaggaactcaaacaactctacaacaacaacagcaacaagaaccaaataactccgttaaaatgagcaaaggacatgagtagacattttcaaaagaacacatagaaatggataataaatatataaacaatactcaacatcactaaccatcagggaaatgcaaattaaaaccacaataagatatcatcttccaccagtcacaatgactattactaaaaactcaaataatatcagatgttgctgaggatgggaaatgaaggcaactcttagacattgttgatgaggatgtagatgagtacaacctctgtggaaaatggtatggagatttcccagaaaactagaaatagaactgtcatttggtccagcaatcccactactgggtaactacccaaaggaaaataaactattatttcaaaaagatacccaccttctatgcttaccataaaactactctcaatagcacatatgtcaaactgagtgtctgccaaccgatgattttataaaagaatatagcatgtatgcacaattcaatactagtcagccacaataaggaatgaaactgtgtcttttgcagcaagatgcatagaagtgggggacaatataattagtgaactaactcacaaacagaatgtcacatgtcacacattattacttgtaagtgggaggtaaacagcgtgtacacaaggatttgtagagagaaattacacacattggagacttacaaggatgggcgggcagaaggtgggagcatgatgagtcattacataacaggcacaatataaaataattaagaattgaccaatgatcttaaaattaaaatgtagaatatgatcaataaatgaacttgatattagttgacctcattaaatttaaaaactttttctactcaaatgactgtaagaaaatgaatgcccggttacagatgagaaactgtttgcgagtcaaataaccaccaatgtaactataataagaaacttcagaactcaactgtgaataaaaaagaaacaactgatggataaattaggcaagggtttctacagacatttcgtcaaagaagatgtgcagatgacactgaagcatataaacaggatctcaacaggattttccgttagagaaattcaaatcaagcccgcaaagagacaccactgtacactttttaaaatggctgaaattaagaagaaatacagataacatcaatgctggtgagcataccaggttgctagaggctaaaacattgctaacaggaatgcaaaatgaaacagatactcaggaaaataatttttagttttctctaaaatcaaacatacccttaacacctgaatatttgcatcagagaaaaacaatcttacattcacgcataacttctattcaaatattcaagatatcgtgtgtatgtgtgttagaaagtaaaaataacataaatgtctcaaaatttgaataggtgaagaactaggaagcatctataaattgaataccaccagcaataaaaaaataacaagtgaccgatacataaactattacaggtgaactccagacattgtgctaagtgagagaagccagtctcaaagatcaaagggacacagctgtaagcaccacggtcatcctcaggtgtcagtggtttgggctggactttctgtgtctctttcctgaccagacccagatattgagctccaccacttgcagatggaaaatcctattttcaaccatgcagtgaggtttgaactgcttcacagactgaacgaaacaaacacgggctcctttgaacagcgtccggcatttgttccaaccacaagagaacgtccctcagctctcccacctcctcggttctctcctgcaagccagcagccctgcagtttagcctgcatctcccgtgcatccacccatctccctccaagcaccttcccccacaccctccactgtttctgagagcacaggcaggctttgaacttttccgcattctgttgttattgaagttaggatgtttaggaccaacttaaggatcatattttatgactgaattccagtgccccttctctcctgggacagagtgcataaccaagtttctgcaggtggagacgaagttgagcttttttcttcctcagcctaggagatgagcgctaattggagggttggcagaagcttcccaccatcccagcactttggttctggtggggcggaatcggtgccatagggcagagctagaaaccgcggactgaatgttcccagtggcactggacccagggcagagcctccatccacgagtggggctctatggaagaagtgagtctctggctctcagtagctctcgtccagcactgaacctcagcatcatgtgctgtgtgcagggtcagagggccaacgtactggcccctgggaaagcgtttcctctggtgggagttggtagaaggtgtcctgtcttcttggctgcatctgtccgcagtggagtttacatcatgctgagctgggatgtggaaggaaggaagagcatcttagatcaaatatgatgactggccttactgagttttctagattttcctgaataaatgtttcttcactcactgtgtgctgttagagtctttccaaacctgtaatttcccaaaataattttcactggtctcatgagggcatggattcattgagcccctcatgctgtcaaagagaaatagaactgtttttttttttcacttcatagcgaacatccatgggttatcaaataatgggctggcttttcttccaacactttacagacaccatcaattttcttcttgcttataaggttttaaccagaagaatgctgtcatggtcttttctgttcttttggaaggaatgccccctctactcacctccacttgtctgcctgtatttctatttgtctttggttttcaacaattttaataagatttacctaaatgtgtgtggggggagcatggggtgttattctgctgttctgtgttctctgagatgcatggattcaccatttactctgtctccatttttgtgaaaacaattagaaaaaaagtcagtatgagcccagaaacaagcctccctgaagtgggcacaggaccacctgggggcgctcaggacccactgaacacaagagccagccccagggcaggtgcagatgcgggttaagttctggtttcctgtcaaccctgtggcttcctctccataaaacagtttcctttgtggcatatctctggattccttatcctgttcttcctgtgaagtctctgaagaagaaacatttgtcgtaacaagagaaaaactttctcacatgcaccaaaggcagagtcacctacagtcacttactcctgtttctcaatgtcaataagttaccaatgcttctgaagttaatcagctaaatctataaaaggtgcggtgtttaactcagcattacagcccagctcaacagaactccaaaggtcagccagcagcagccaggaaaaagtgcatgctgggcattggggcagagggagttaccatccagtgcaagagaagaaagcccccgtggtggtcattgtcaggactccaatcccacagttccaattgtaggtgatgccaggcaaaggaagagagaccccaccaatggttagtgtggatgtcgagtttgatgtttccacactcacactccaggtgaatatgaaaagatttattagctctatttctgaggtgtctgctgagagcagcacagtcctctcaagaaattacagattggaatttcctcagtagagcaggaaaggaggctggctcagggctttataatgatttggtggtggggtcggcgggggggggggggcgtttctactcaggagaaggagcttgtgtgatttaaacctcacactgacatcacatgagggagcttccatgatttcttactagatttcccatgtgtgggggacaaggatgagggagaataaaccttaattcatcagcatcaaggcaccaaaaataggacctgacactttattctccctagcagcttaagaaaatgagtgaaaaagagagataagagtccacccatgtgctgaaaagcatagctcttggtaaagacgagaaaaaggcactcctacgaagaaggggttgggcagaagctttatgctgaagggtttggctaaagagacataatcaacaggttacaggaggggctactgatgttcatggaggtggtcctcacacatgcatactgaacaaacatgtctgtaacgtatgacccctgttcacttaccagtggagacttagcatttaaattcattccagtcaggccctatgtgcaaacagcagaagcagagacacaaaggtactcagggtgcagcctctgtgaacggccagagccaggccatggtcagcggtctcggattaggagaaagttcctgatatcactgtagtgttcaatcaaagctggggttatggtttgtggaacaggggtcagttcatcagggggtgggctgcaattgtcttcatagtgcttgtctcagtgccggtgcttactgagccactagagaaaaaggtttaattgagcttctttaaaatcaacattttgaattatttatcagacgtttcaaatatgtcatgttgtttagattctattgctggagagttaaggtgatatttggggttttgtaactctgttttttcatacttcctgaattgcttatctgtttgcttttcattagctaaactatcgcttcttcttattttttaattcattctgattttgatgaatatttaattccctttagaatgtgaatataatgtacattgtgtgggtattttgattttggttcttggtttacttagtggcaaagactctgtaagagttccttgtctatagatagccattatttagtggctttctgaaatggtggttttagtaccaaagtactggacttgtgagtaggctcactgccccctgcaggtcctagatagtggaggcctcaggaactgtttctcatttggaatgcctttgtttcagcagattttgtgttgggttgttaagttcaccctccacattagtagatgtccttacagattagagctgactctggtagaagcagttgagtgcatgcttgatatctgtgcacagggagaagctctctgttgcctcaggcgatggactggtctatgaaatgcacagtgacctgagttccctgctcagcccctgagaggtggaccaagctggacacacatgagccaccgagcctggcaagcaaaagcgccagccttgatggaaatggcgagctgagcggcatctactcagtgtggtttcttttgttattaagagctttagtgtggtggctgtttcaaattcccgttgtagtagtaatatactgggtatgtgagcaggcccgtggtcttttgcggggttggaatcaccgaagtaatgagaagctaatctcattttcaactgctgtacactggtggtattgagtttgtatgaggtcatgcagtttgaacgtcaggccagtaggtggtgctcgcaggtaagagccggctatggtggcagcagaagggtttatgctttactggtgattaaagtgggaaacttggcgtgttccagatcttagagaaaagatttttagttatttctcattcaacctgatactacctgaaagtctctcgaatgtaacttttattttgtcgagatgggttctttctatacccattttttatgttttttttgtgaaaggatgttgtttcatcaaatgcgttttcagcatcaattgaaaaaagttatatgtggattaaagatcaaaatgtaaaacctaacactataaaacctctggataataacataggaaacagaatttaggaggtaagaactgacaaaggttttataatgaaaatgctagaagtagttgcaacaaaattgaaaattgacaaatgggacctaagtaaattaaagaacttctgtacagcaaaagacactatcgacagagtaaacaggcaacctacagaatgggaaataaaatatttgcagcctatacatctgacaaaggtccgacacttagtatatacatggaaatttaacaaacatacaagaaataaaaagtgaccaaaggacatgaaaagacacttcaaaaaagacctacatgtggccaacaagcataggaaaaaatgctgaatatcactatcattagagaaatacatatcaaaacctcaatgaggtaccgtctcacatcagtcaggatggctaatcttaaaaaaaaaataacagatttttaaggttacagaaaaaaggggaaatttatacacttttggcgggaatataaatgagttcaaccattgtggaaagcagtgtggtgatccctccaataacctaaaacagaagtttcatttgacccaacaatcctacaactggacatatacctaaaggaatataaacatgtaggttcactgcagcactatccacaatagcatagacatggaatttacctaaatccccatcactggcagaatgatagagaaaaatgtggtacatacaaccatggaatactatgcagctaaggaaagaatgaaactatgtcctttgtaggaacatgatggaactggcagtcaatactcttagaaaactaattcaggaacagaaaaccagatattatatattctcccttatttgttggagataaataaaagcaaatattcttccagggcctgagtcttccttattcaacaagtcattctaaattaagtgttcagcaagttgctgatactcatctaaatattctatttcatctgggccacttacatcactcaaaaagcaatgagagctatatttctaaggggggttctaggataataaatacctgaatagtgagaatatgaaggatatggaaactgggccacttatatcactcaaaaaggaatgagagctatatttataaggggggttctaggataataaatacctgaatagtgagaatatgaaggatatggaaactgggccacttatatcactcaaaaagcaatgaaagctatatttacaaggggggttctaggataataaatatctgaatagtgagaatatgaaggatatggatggtttttttttaactcaatgggcacataactgtgggagatactatattcctatgaagaaggtattcagacttcagagataagtaatgtttcctacattgtgcttgtgacttggaagcagtggattgaagagtgtgataagtgcccagaccaagcagaacagaaatcagcatgtaaagatgatgatctatggatatgatctaaaaccatgtaaatacttcaaataattctatttaatgcagtttgaaataaaacacaaacttattcaaaatacaaattacttggtaattattttgggagctatgagttcaccaagaaactcaaattcctatttctatttcaacccctgattcctactgtcaatgggagggaagtctcagaaccaatcacacatcagacggcaaatctgtcaaccaagagtctttccactgaaggacctgggaggtcaggaccctcaggaaagtgctggggaccctgtcttgggagtgcccagcagatctcagaactctccatgggtcctgctggacactcatgtagggtaacgagtggccaccttttcagtgttaccagtgagctctgagtgttcctaatgggaccaggatgggtctaggtgcctgctcaatgtcagagacagcaatggtcccacaaaaaacccaggtaatctttaggccaataaaatgtgggttcacagtgaggagtgcatcctggggttggggtttgttctgcagcgggaagagcgctgtgcacagaaagcttagaaatggggcaagagatgcttttcctcaggcaggatttagggcttggtctctcagcatcccacacttgtacagctgatgtggcatctgtgttttctttctcatcctagatcaggctttgagctgtgaaataccctgcctcatgcatatgcaaataacctgaggtcttctgagataaatatagatatattggtgccctgagagcatcacataacaaccacattcctcctctgaagaagcccctgggagcacagctcatcaccatggactggacctggaggttcctctttgtggtggcagcagctacaggtaaggggcttcctagtcctaaggctgaggaagggatcctggtttagttaaagaggattttattcacccctgtgtcctctccacaggtgtccagtcccaggtgcagctggtgcagtctggggctgaggtgaagaagcctgggtcctcggtgaaggtctcctgcaaggcttctggaggcaccttcagcagctatgctatcagctgggtgcgacaggcccctggacaagggcttgagtggatgggagggatcatccctatctttggtacagcaaactacgcacagaagttccagggcagagtcacgattaccgcggacaaatccacgagcacagcctacatggagctgagcagcctgagatctgaggacacggccgtgtattactgtgcgagagacacagtgtgaaaacccacatcctgagagtgtcagaaaccctgagggagaaggcagctgtgccgggctgaggagatgacaggggttattaggtttaaggctgtttacaaaatgggttatatatttgagaaaaaaagaacagtagaaacaagtacatactctaattttaagataaatattccattcaagagtcgtaatataagccaaattcacagagtggaaaaggccacactctataacgttgatacaaacattccatgaaggtgctactgtgaacaagttttcaaattggatgaatacatgatttggagcaaggttatttgatcatgtggtgagactaagaatgattcttaaaaagtgccaaaagtttccttcaaatgtttctgtcactccttatcataaagtttattttacagcagttttaggattacaaagaaattgcacaggaggcgtgagaattcccatgactccctgccctacacaggcacagcctcctccactacgaccatcctgcaccgcagtcacaaatcagttacaatggaggaatctccaaggacgcttggttctttctttttctggtgatctcctaatataacaagcctaagtatctcaagattccacggttttttcagtgttttctagaactgatattagtcagagggaaagtgggtaaggctattactatttgaactctttcttccaaaatccacaaaatatatattaatttagagcttatcttacttctggtttacaatgctccttcccagagagtaagatttttaagcttttagaggccagttcatgtctctaaaagaccagaaagttctggggaatcccataatgaacatcctttcattggaattggagaccctggcaatgagagattccatgtataatgccctagagttggattaggtgcactgtgagctcttgggtggtgagtctgagtaaggtggtttgtgcagcaaatgcaaacacattcatgggacccaggtaggaacaaaagcttccctctgcaaagggagtgtgcacctgaagcagccctcacagaggtgggcactgcttgcccttgatgagtgcacattagccagaggcatgatcatgattggtcttgcagataaagagcaccactgaggtcataggttatgaaaatgtttgtcatcctccagctgagcaagtccatctgcttgtttgtgggtgtcaactccatagagggtgcactttgggagatgacaagatgcgcacaaacctgctctcactaattatccactaccacacactcaagaccaacctgtgctccggaaaggaatacgtgcctgtggaaatagacagagcttaagtattttgtaacctggtgaacatactgcccaaagccacacgtttcaggaagattagctcagaaatgttcaccaattgactgaagggcagtggcgggtgaggtgatgggacagcctcagggctgcacatgaggagggctccctcccccatgcaggcttttcctccaggagctgcatcaggacctcaaggaagatcagggagaattctgagaacacccttctgtggagctgcctagagaagaagaataaatatgaaaaaatacaactctgagtaatgcatggatatttgttcatgaaaactctctctgaaagcttgtgaaggtctcgaaatacccctgattagctgaagacaaacatttaaaccctccttccacagggagttcaagcaggctggatgtgtccttctatggatgatcttccccaaccccttcctcttcccagctcatccctggctctctgtgtaaacagttctcatcagtggaatgtggttgatgaagtgacgtcttcaatttcctcatcttcttggtggtcatgttattttttttcatctgagggttaaaaactcacctgcatgcagcacatgacaggctaaaatctcttgtggacaaaacggtaacaaaggcacccaccagggttgagcatccgtgttgctgacaacgaccaccaggggtcaacgtcctcttcacaatcctgtgtcagagcatcactggaatgatttcattagcaacttcccaggagaatcagcttaaaaaatacttgtcccattttccatgcagatataacccatcccttttcctgaagaaacagagctcaatactaaatacactgaatgttgtttttgctggttttgtaagtttgtgactttatcactttctaatttctgagttaggtggaccactctacatatttctctcatgggtgtgaccagccttctggatgtcaaatataactgactttgttcgtgtaaatgtcaacacaagctcttcatggtttcggtgctcactgactactctaaacttacacaatgtgtttctttattagctttgttttctggtatctctacgtggcttattcatcacgcccattttatgttacttgtacaggtaattgattgttatttttaaaatttactattgcttactttaattaaataagtaggcaatagcttagaatagaaaataaggtaaagtaaaagtacatgcagtaatatttaatataagtaagcaggcagctgaaagcaagggaaatctactctgctgtgtaaaagggtatggagacctcacagtatgatgatcttctgcagtttaatccatactgctacataagtgacaacgtccactctgtttatatcagagcttcccctaatatgtacaatgaagactgagcccaggtacctccaaccagaatggccagcaccttttaccaagtgcctgaactgacagcaatagagatcacgtttgtctaaaaaaaaactcacactgtaaggatacccaccagtcatatggagacaattagaaaaaattaaagcccaagcctgataggtagtaatttgtacttagaagaattaacttttatctccacatgttttttttttaatcatagagaaactactagtggtagttccactgtccaagttactgaatatcttattcctagaatgagacactgcacaatgtgttctgacacgacagaacgtagctgtagttaagggacaggagatgtgatcacgggaacacgagtctgcgatccagcagttcttgctccttcacatttgcccagaaacaaagaccccagcagaacaatggaagcattgacttaggtctccacagtctgatgtgagataaacagcaggtagtttatgcctctgttttatagcaggaaatttaatctctaaagaagggccattttggagataatactattctccaggatgcttaaatgcccccaaacagagagcactgcagagccccgtggccaggagctacaacacctgggtctggaaaccactggacagaaatatgagattctcttaccacatgtatgatggaaccttgaagaatgtttccttccttctccataatcacagcctgcgatgaactggaggtcccagtacataaaaaaacatgtgtctgcattggatacagaattagtcccataaaataattgtgctactgtggtgctcacactgttggaccagctgaccaagaaagtgttgtaagagctgcagtgtctactgattcctaccatatttggggctacattcacatctatcaagggaaagagagataagaaaatctctctaggccgggcgcggtggctcacgcctgtaatcccagcactttgcggggccaaggtgggcggatcacgaggtcaggagatccggaccatcctggccaacatggtgaaacctccatctctcctaaaaatacaaaaaattagctgggcgtggtggtgggcgcctgtagtcccagctactcgggaggctgaggcaggagaatggcatgaacctgggaggcgtagcttgcagtgagccgagattgtgccacttcaactccagcctgggggacagagctagactccataaaagaaagaaagaagaaagaaagaaagagagagagagagaaagaaaaataaagaaagaaagaaagaaagaagaaagaaagaaagagaaagaaagaaagaaagaaagaaagaaagaaagaaagaaagaaagaaagaaagaaagaaagaaaggaagaaagaaagagaaagaaagaaagaaaaaggaaatctggcctagtctattgatttattttcatttcttcaaaatgaggtaaaaaaatcgcatcaactaaaatgcggacgatgatgaagtgatcaaagacaacagccactcagtgtttcaggtgtgttttaacccaaagtcacacaacatgtgagaagctgaactccggagccaggggcatctctgaggagaatgtggaaggtgggcgggaggaaacagtgattcatgtctagggaaatttcagggctgcctgctctaggggaaaggaaagcctgagcctctcccacagtgtgctctgttaaaaattttggctgacttattgtattcttcgacacaaatatttttgtttcgtcctcttttaaatttttttatctctattaaaattctcactttgttcttgcatgctgccactagcttattaaacatgtttctaatatttacttcaaattttctgccaggacatccatatgtttttttattcattgatgccagattctggacctctatgttgtctgtctgtttggaccatgttcccgtgtttcttcattttccttgacggtctttcttgctatccgttcatcataacaaacagctctttgctcatcataacaaagagccacactcttccaagcctaggctcatagagacaaccctcaccaatcactccatcagtgattgcggatctctcaaaacttcataatgacttcataatattccaacttctgtctctgttcttagtggcccccaggtttagagaacgttgggttgtgccaggactcccaaataggagaggtagaaactatatactcaagtagcctcttgaacagtgtaccattagacacagttttattattgaggtatgattcatcaaaataatgttagttcaagcgcctctcaaccagtcatctaacattgaaatgttataatttcttatttggatctctctggagtttatcttttgaatatttaggtaaaattacaaactagtataaagctatttggcaaaattatctgctgcagaagtttcatcttctgtgtatctctttttgcacttaaatatgtttttattagtcatgtatccagaatatagaaatatgtcttaaagttccttcatttttttaaggttatggggttttcagaagaggtgagaaccttctttatttataaaatacctgattccacattgctggatagtttcttctttaatttgtctcctcctctcacattatactatattaagcaaggagaaatcaaaacacaccatccacactttgcttagaaatccccaaagctaaattttaagtatcacttactaattctaattttacccattgtaacttaattaacatgaaatctataacaaggttacacatactttcccgttctaataccatgttcgtgacagaaacaaagcaggtgtcttctctgcaatgtggtcatctgaggtctgagatgaggggtcacacaggtattttataatatttaagggtttggacaacagtagtgataacaattctgaacagcactggctcctaattgaaaggttataggtaaatttaatgctgcaattttatattaacaccttgtccgaatgaagctcagaggaagatgccacatcccaggtcacacagtgaggaggaatggagctgtgctctgctctccacaccacctacaaatcccaggccccagcccaggttccactggcgcacggcacctagagcacagttcccaggggatgatctcagggcacctgcttcctcgggcagggcgctgccttctctcagttgtgcacttgctcctcctgcaggttctgtagtgagcacttgcattgccgtgatttatacatgttctctcccctaatatggaaaaaatatttattaaattttcaactcattttctctgatgcacactgcattagcagaaaggaataaatcacattccttatcctcccataaagccaaagattcccgaagacagagctgatgtgatgtactcataggtggatctctgcccctcaagggaggccttggtcttcaagtttcagtaattctaggaagcgaaggacacctacatctcctgctccctgctctgtagctcacctgagaacagctttctcattggaatgtcttgtgtttaaggaataagagtccatgtttcaggttcgggagcccaggtgcacctactggatgcagcccaggattggagacactttccagaagacaacatcacctgagacatgaccagtcccactgtttcactttcacaatttcaacttcctcagaagaaaattaaaattgctgagacttgttcataagtgttgtgccatgtccttactctgttttcttgcctgttcatttatgtcataccaggtgtctgttatatgtaataagatcaaaattctgcctccagtaacacatcaatggagacctttgattgtacttttggtttatgcactgacacatagattatgatgttcatcacattcatttttatgtcaaaggaaatctgcataatctgaatgccaatactttttggaatctgctaagtaactgaaattgaaaaaaaaatacccactcaagaacctggatagacagccatgtccagaatggcagttgacacttgtttaactggaagagaatctacagaagccacaagttgttgagggcacttacatgataagcactatagttgtcttaaagacagatgtggactcagtaaatgtgactgttccagagggtcttatatttctatgttttatggactttctcaccagaaacctccagattctaaaaaatactatccaaatacgtttcttatttgtcagattggagaagattaattactgaaaaatattacgggagactttttcaaaagcttctacatggaaggacttttcgagaaccttgtcctatgtaaaggaagacaaatctcccattccagatttctctcccattcttccattattatagaaatgagcaaagttagccaataggggtaagatgtaagtaaatagtccagggacactgaaaccacaaaagggagtaatggccaaagtagcttttcccctggagattcctggtcaaagtcacagcccagaagaggaagccgatcgcatctctaggtttccattgtcaaaacaggcagtgcttgcctgcactgcacaatccattctaaccagtgtgatagctctggattaaagatggaagtgtggcaatgcacagactctatgtgagaagaacactggaaaactaaaggacaaaggcagagagtaggacaaggacgacaaagcaatctgaagcctctgacatcaccatttttaagatcaaggtcttggaaactccctcattgacctttagatctctaggagaaaaaagtcagatacctgggcctagtgtcagtgtaggaggaattttctataggctaggcattaggaagaagggaaaattcttccttattaggaagttattgttatagtgttatagtgttattggaatagtggatatggagtgggctttcatctcgatcaatctgcacctgctggtattttccaatgctacattcacctgcaagagcccaatgaagaaagaaggcactcccaaatcttttgcaagtttttgtattcactgtgggtccactgcttaagtgcatctggagcttcagagaaggggctctgtcctgtgtcatagaacccttgctttgagtctcacggcagagttcaatctgtttagtaaagttgatcaattatttcaagagatggtgtcaccagcatatggtgtcactgagggagtattctacactagcacacagccatttcacgctgggctagagaagctggggggaaatgctttgtgagccccaacaggaacctccttgcaaggcaagggctgggcgggagggggcactcaggagccactcagcacgggttccagccctgcagctggtgcacaggaggctgctgagaaggtttcctctcaggggctgggtcttcctttgggagaaaaaagctaaaattcaataagttgctggtgtgcccttaaatattctatcacatctgagctgctcccacaattcaagagaaggagaactatctttttaaatattctatcacatctgagctgctcccacaattcaagacaaggagaactatctttttaaagtcggcttctaagattataaataccttaatagtgagaatatgaagaatagggatggtcttactaattcaatgcagagagaattatgggagtcactatatttccatgaataataatttcagatttcaggctggggctggtggctcatgcctgtaatcccagcactttgcgaggctgaggtgagcgggtcacgaggtcaggagctggagaccatcctggctaacaccatgaaaccctgtctctattcaaaatacaaaaaattagccaggtggggtggcatgaacctgtagtcccagctactcgggaggctgaggcaggagatttaatcctacaagacctacagcctcagacaatgctgctgtcagtgatcgtgggaagcagagtttgcagtgagctgagattgtgccactgcactccagcttgggcaacaaagcgagattccatctccaaaaaaaaaattcagatttcagtgttaagtaaagttgcctacattgtgtgagtgacagggcagtggtggatccgagagtgtggatctgagagtgagtcagaaatcagcatgtaaagatgaggatctatgcacatgaactgaaagtatgtaaacagttcatgaaattctaataaatccagtaggaaataaaacccaaacttatccaaaacacaaattcccttgaaattattatgggagcatgagttcataaagaactcctaactcctgtttcaacttctgaatcctagtgtccatgacataagaaaatcatctccaattatgcatcacagggcaaatctgtaaactaagagtttttctgttgacgatcctggggaatcaggacaccaggaaggtgctggagaaactgtctcaggagcgccccagggatctcagaggaacgtgctggcactcacgtgggacatcagcgtcacttgctcagagtcatcagtgagctgtgctggtgtctgacgggtccagcatagggccaaggcacctgctctgtgtcatggaccgagatggtccccagaatgatccaagtggtctctgtgctaatctaatgtagtttcacagtgagaggccgttctgagggggcttcttcttcagtgaaaggacctctgtccacaaatattcctaaatggacaggggcatgcatttcctcaagcaggattagggcttggaccatcagcatctcactcttgcaaggctgatgtgtcatttgtcttccctttcttatcatggatcaggctttgagctatgaaatgccctgtctcatgaatatgtaaatacctgagatccactgaggtaaatatggtctgtgccctgagagcttcacccaacaatcacatcccgcctctagagaatcccccgagagcatggctcctcaccatggacaggacctagagctaatcttcctggtggcagcagctacaggtaaggtgctcccaagtcccagtgatgagaaggggattgagtacagtcaaggaggctttcatccactcctgtgtcccaccctccaatgggtgtctgctcccaggtgcagctggggcagtctgaggctgaggtaaagaagcctggggcctcagtgaaggtctcctgcaaggcttccggatacaccttcacttgctgctccttgcactggttgcaacaggcccctggacaagggcttgaaaggatgagatggatcacactttacaatggtaacaccaactatgcaaagaagttccagggcagagtcaccattaccagggacatgtccctgaggacagcctacatagagctgagcagcctgagatctgaggactcggctgtgtattactgggcaagatacacggtgcgagaacccacatcctgagagagtcaggaaccccagggaggaggcagctgtgctggcatggaggagatgacaaagattattagattgaagactttcttagaaaatagcattaagtcatttacgaaaaggaacaatataaatgtgtatttgagaaattgtaattatttgagagatttcttatgcaacatttattctgtaagcaaattctagggattggagaattaatcaaattaataaagctgacatagaaattcctctgaaggtatctttgtaaacatcaatttctgaatcagtgttgtaaatgttttggaacacagacacaagatcacattttaactctacttttgtctctataaaaaatgccaaaaagagtctcattttgaccatgtacctctttgaattcccaccatcaatgaatgattgttcttgggtttccacattatattaccatttatcattatgagaattgtgtgttttaaccattataataggtgagtaatggtatctaatttttgcttaaatgcacatgcccctaataaaattcatatttaacaattttcatataatttttggtgagatgcctctcctgatatttggttcattttcaatagcactgttttcttttgattagttgtaagtttacttgcatattgattataaaagttaattaacaaattaaaagaattcatttaacaaatatgtgacttggaagttgcaggggtttgtcctgcacaccctgacacaatgacgaatgaataaagtgcactgacacaaagatattctgctttgccagctcgactgagcatctgggccacttagtcacagccaccgcctcgatcagtcagggagacttacatttattcagtaaagattaattgacaaaggccgtgagtaaacaccactagaaggtaattgacattgtggacctcttgagtggaaagcaattaagcacccgcggtagatcaaaggttagtcttaggaacacatgagtaaacaagctagttagataagctcctcacattcctttgtttctactctactttatgtaactaaaggtaaggggactaggctgccttcagccagatttattaccaaagttatgcaaactcacaggccttccaagagggtttgtggctattagaactaaaatgtttcccaccagcctgactggaccaccacatctccccattttttgttttctacatcaggtcttttggattggagcgtgcagatatgcgcagcaacatgtctgtcaggtgtggcagtcattgctcttattctggctttgcatcctagaattagcaaataacataaaacaatcatgagtagaattagcaacattcttttccagtcagagtgacccccaggagcggggtctaaccaggagagatgatctcacacacccttccatatgactgtttgttgggggtgtagatctattgcgtgaagagattctaaaattttagtttgaacttactttacgtctgctgttaaattgtcatgaaaggttccccagaggtattgttttacctcatcctaactatgtattgatagattccgtggtagagaagtgatacagatatgttcatgttcccagtcacagtttaaatgctgtcagaatgccactgcatcttgtcgctccctgacatattctaaagcagcctcaagggctagcagacgtgtgataattttttgatctataccttgctgtaagagaagttcattagacacatttttggccagattatctaaaaaggcagcagtttacactaagtcaataatacatgcaacagcaacactagctgttgccaggatgactatggctgagactataaaggccataagtgtaactatgaatcttttgtgtctgacctgggacagggcacgttctaaggttgcaagggcataggaaccttgccaattgcatgccagattgactggtaagaatgcctcagattttctctttaataccatggcgctagtaatttttaagttagatatactgtgattagtgatacatgaggcaaaccaagcctgtccctgcatccaggtcacaaacgtggagttttgaggtgtaatggaaatgttagttcccataaggaaatcgtatggatgggtagtgcaaattaggcactgatcagtgtgattatgaataaagcttatagcatagttgcaacgggaaatatggtatgtcccatgccaggtgttaagggaggtgctaagatgtcccagacaccataaagtaccttggggcggcatggactttacttggggccttggatatgccatccccccttggcacaaattataggggaaaagacatggctatgaaactgattgatgctctgatggatgaaggtattagtaaggctgccctgcaatcagccgctgggactccagtctaagatgttataattacctaactggaggctatgggctcgtctcccatgacagacctcccagctaaagtcgaaccgattactgtcccagctttgttccttagcacaggaaggaatgtttgggaaagaagcagcggcatggattgcattgctcagtttgaggctatctgcagctaagaatgttaaggcatttcctttgctatgatgtaaccatacttgtttttgggcaggtacacagtaagggttagagtctttataacttacacacactgggaggataatagtggattgacatatagtgttatctgccaccttagtccattgtgtgccattattgagggaccccacgtggggtaaatctatccctcctagccaagcagtcacgttactataggctgggaagggagtgtcttcccatttggcagggtgaaagaaaggtgtgtctaagatagaggcccaatagagtgtagcaggtacaggttgcagacaaagtgagagcataaaaaggattaataccctacatgagttgcaatgtacaacagaaatcatagcaccaaacacattatctggagtaaatggtgtctgcatttggagcaggattcgttcagcctcctgagttgtccttttcagtaccccccaggtaatgtctggggattgtgttgttcacagaagctgcatcgtccggggctgtaggtcttgtagggttaactccttcatttctggtactgggttgggtcctagcaatgtcctggtatggtttgatgcgtcgtgctggaacccaaagacgacccgagggggtgtggatacaagcgtaccctcttccccacattaataattcacttggaccacaccattcattactgtttacatctttccataaaactgcaggtttcatgtattgggaaattttagcaaagtgcttttctacagcggattcaaatttgtcttctaaattaaaaaaataaggtttgtgccaaaagtgttgcagggtctgtacccatactcccctgtttttgttttttgtgcatattttaagggtggagttggcaagttctactattgcttgtccttggggtttatatgggatacctgaggaatgtcggatattccacgtgtgacaaaattgttgaaattgtgagctggcctaacctggacaattatcagtcttaatttttgcgggttgttccataaatgcaaaagataaaagaagatgtttaatgacatatcgagtaaactctccaggcggagtatgtgcactacttaaatgagtgttgatatcaaaggatacatgtacctatctaagttttccaaattcagggatgtgtgtaacatctgtttgccacaacagattaggttctagggttaatacctgttgaaggaggagacgtgcctgtgagctggcgatctcagagactgtttagccagtctctgtataagttgagctggcgatctcagagactgtttagccagtctctatataagttggaattgtttagataagtttttccaattttggtggaaaaattggtgcaattgggtggcttggtcaagcagcgatatcataacttgaaggttggcttgattattgtcataagctaatggaccaggcagtgagctgtgggctggaatgtgtgtaataaaataggatgtgtactttgatttagcaattgctgaaatcagagaaaaagagtccacagggctggctccagagttgacttaattagggctgtaaaagttctctagacccaatattaaggactcaactttagctttctgagtgctagtaaacccagattgagtgaatgaattgtgtggtgtccaccagactgctgcttttccatatttaccagatctatcagtaaacagtgctaaagcattaaatatgggggagtaaactatttttgtaggtaacacattaactaggccttttgggaatgatgaaaatgggtaaattctaagggctgttagtagaatattacccataaaatgaataatcttgtagccaggaaactttttcctactagggagcaaagcttgcttttaattgctccctaactaacttaggggctttttgtaatgtctctccctttagaggttactgttttacttaaactggatttggagtcatgttaggaataagagagagataacagtggccattattagaaagaggtttctcaaattcttaaattttacttaactcttatcatagaattataatctgggatgtcgcttgtatacaaagaacataacaaattttgctttgggccgcctgcggagccagagagcggagcaggtgggtcccagggcggctgcggctttgtgcttgcttagaagccacttttcgccaccgcgtttcctctgtgccagctccctccccacactgctcagcagctgctgccggcagaggggagcttcctgcacttgctcctgcccctaatgccttttcttaacccttcgtgtacctgattgccttgctgatcttgcattactgggcagtctaagagctccccttttaatgctgcttgtcgaagacagggacatatagctgtagtgtatttcctctattttttctatctattgaaagagggggctcaggcaaaacctccgtttcctctttgttattttgggaagagcaggtggtaaggcaagtgacgtttcttcctccttcccctttttgggttcttctttgtataatgggactaaagccatccctactaaagcccatagtgttaaagatgatgctgggacccgttgcgcttgtgtgtaatgctgttcaagatttctccctacttgttcccagagctttacttctagctttccttcttctgggaccacagattatgtgagacaacagttttcattaggtgccttaattgagcctgcgaaactgatgctcccctagccttaagcaactgttacaatactttcatatgctgtttgtgttgagctgataactgctgtcccatgatgaaatctcagcctgaacaatctcccctgaacttggagatcccaagtgggcaccaatgacttactgttttactgacttgaccacgcagtcttcctcaaccttcgttttcatggggtctgtcacgctccctttgcagcgatcctcacatggggcaccggctgtgggggtctgtcctgcaggtcctgacacaacaacgggtgaataaagtacactgacacacagatattctgctttgccagcttgactgaccatccaggtagatcaaaggtgagtcttaggaccacatgagtgaacaagctagttagataaactccccacattcttttgtttctactcaaatttactaaactaaaggtaaggggactaggctgccttcagccagatttattactgaagttatgcaatctctcaagccttccacgaggacttgtggctattataactaaaatttttcccacgagcctgactgaaccccacaggaagtattttctccaagtctgtggttgccttttactcccttatcagtaggtatcgcagaaaaatgtgtgtgtttgtgtgtgtgtgtgtttgtacaaatttagattgaaaacatatataattttattcattcatagatcatgcctttggcattatatctgaagtttcattataaaataaactaatagtcattattttttccatatctctaatctcaggccacaatcaactcatgagtgtttaaacttcacctgcttgattggaggaccatcaatctaatgtatttggaatacttctgtaaggagatgtgttcttcttcctattattttttaattaatcatctattaatatcagtattggttgatggatgtccattttatactttgaaaaagatccatgctacatcattcatttaattgttcaaagcaccacagctttattaggtgctgggagctcattttgtttgaatcctgcatccttacagcacacctcatatttttgtttttgaacacttgcgtatttcctggtattaccataaattctaagcttgttttctttattacctttttttacatagaatcaaccacttttataaagattgcatgtttctgatgttaaagaatagtattaaaataaaacattgtgatactggctctgtgtgttgttaatgtggtatgagtacttctagaacctctcaaacaatggtcccagtaaacgtgcatgtttatgtgaacccaagtttatggactcattgaaactatttatgtatctaatcttctgtaaccatatcacattaaaaatgagaacacactggtctctccacccaactatgttagcacatgaacctttctagtcttctttctttgcgtttccataaccacccactgcaaagtgagaaaccccattccaccatatgtaattttattacttagctgcacagtttcaggacacatgcatagcagtatcaaaagtgtaaagctgtgcccttgatggaaccatgtttatctactagaatagagtgcttatgtgcagattttttacacattaaacttatagaatttcttcgttttctgagttgcttaggtcagcaacttcattttccacattcttcaatgaagtcatttcaattacattgtataatttcatttatttgaaattccataaatgcttagactatagtcaagtaaacagacagaggatgttccaggaatttagagagtgggtataaaataagcaaaaaaaaaaatgtggtgtttaggaaaaataaaactatttttagtgatatgcaatggttgagatatgatataactaatttgtctaagctaataattttgtgatagaaaatataaacttaaacatattcaattaaaaaaattcagcagttcattaaccccaggattaaatgcagactgtataaaattatccaataacttatttggtgagagtggggatgttatgagatacatgcaacaaagaatgaagtaattttccccatttgcatatacaatgtttccattcactgaagaccttttattttaaaaaaatcaattttctaccttacccttgtttttaattcccgacaagcaaataacccaaaggattcttttctttcattggttgagaaagattttcccctaacttcagcttagttcaggcatacgctgacctgaatgggcatttaccctcagatgggtacacacctgtcaatatgtggactcttctgtcagacagacacagcttcactcatgtggattcttccctcaaacacaaatgtccccacatggactatttcctcagactaccacatatgtccttacatttacactttcctcagaaaacagacatttcctcatgtggactcttgtctcagataagcaaacatgtctcagtgtgaatgaagtcttcactcagataagtacacatatttcaacactgactgtttcctgacacaagcacatatgtccaatgttaaactgtcttgcgacaaaatgatctcaagataatgataattataaactccaaccctgaaaatctgtagatctgcattttgtctattgtaacataacttcatctcattgtcagaaacagtcgtttgcagctataaatgcactgattacagtcagatttccattttctctggaaatgtatttcttatgttcttactggactaatttgttgataatgtttgctcacatgaagatacctgaacagtgtccacattagagaataaaaaagagcaatgggcagattaaccctgtgcatccagacgcaggaaccatttgactctgccttccctgaaatggagacacagaggatggatgagcaacgctgagtggtgcacctacgaccacaaagagaaagacctggaaatatgtcccatcccctcctcatgaaaggcagctcatcccctgttccttcaggccctggtgaggagccaccccatatctgtgtctttcttcagtgttcacactatggagtctgcactgatctgggtttcccttctcatcaccctccatattagtgtcccttgtaaatcaggtccagctgtggctgctcatagggttgttctcagtctatttcctctgtgttcatagaagtcctgtatgaagttcagtggtggagtcagaggggtaaacgtagtacagcccagtggttcactgagactttcttgcaaagcgtctggattcaccttttctggcaacagcctgaggttggtccagcaggcttcacaacagggattgtggtggctggcaacagtgagtcaacaagtgggagtgctcaggtttactcttcatgagtacaaataaattaactggtccagcgacaccctttcacgtgcactctaccttacaatgactaacctgaaagccaaggacaaggttgtgtaatactgtgagcttcacaggagagagattatctgcacaagcccagacacaaaaatctgcagggagacaggagggaactgcatggtagatgctgctcagaagcaccagggggcactcaacacaagggggcgctcaggacaccaggcggcactcaggatacagctgggggcgctcaggacaccagggggccactcaggatacagcggggggtgctcggatccaccagggggctcttagggcaccagggggcattcaggaccactagggagccctcagggccaccaggaggacctcaggacacgtcagcgtgctggagccaccgggggggggggggggggggggctctgaggaaaccaagagacgctctgaaccgcgaggggaaggaagctcaggaccacgaggggacgctcaggacaccagggggcgctcagaacaccagtgggcactcagaacaggaagaatctcttagaaagcagctccacatcaggatcctgggaggctgtggagaaatgggaacactcataaactgttgagcatttaaattagtacaaccactatagagaacagcttagagtttcctcaaaacctgacgatagagttatcatataatctggcaatcctgctgctggtatatacccctaaaaaggaaatgtttttgcactaccatgtctgtaatagcactgttaaagcactgttcacaacagtcaaaatttgaaagcaacctatgtgccgattaacacatgaatggataaataaaatatggtacatataggatatgggttaatatcatgccataaaaaaatgagattttgtcatttgcagcaacatggatgaaactggagttcactatattaattgaaatgagcccagaacagaaagacaaaattcacatgttcccatttatttgtgaaagctaaaaattaagacaattgaactcgtggagatagagagggaaaagatggtcaccagaagctgggaaggtctatggtagatggggattattggggatggtcaatgggtagaaaaagtgattagaaataataaataacacataatattttataacacaacagaataaatatagtcctcaataacttaattatagattttaaaataaaagtttatgaatggaatgttggtaactctattaatgcttgagaggatgtataaaatattcttcatgatgtgattattatgcagttcatgctgattcagagtcctgtaccccataaatatatacgtgtactatttacccacaaagattcaaaattaaagtgtttatgtgtctaatattctgtaactatattacattaaacctaagaacacactggcttttacacactactgtcatccacatagacattcatagccttctttctctgcttgtccataatcccacactccaaaatgagaaaacctctcctaagatatgacattaatttacttagtgcacaatttcaaaatacacaaatcgtctttaggattgttaaactgacccttgttgaaaatatgtttatcaactagaatacagtgcttatgtggagcttatttatgttttacaatcgcaacatcaaattctttccaagtctcttgtgtccaatatttatgccccaccttcttcagtgtaattagttcaaaccttctgattgttgttagatatttttatacagctgtctttttttgtgtttcatgacctgctaaatactttcgaagttgtatgcatttaggttaacactttgtctcaaaaaatatgagttttcagaaattctttatgccatgtgtccatcattgaatatcataaaaatagtttcattggccgggcgtgttggctcacgcctgtaatcccagcactttgggaggccgaggtgggcggatcacgaggtcaggagatcgagaccatcctggctaacacaatgaaaccccatctctactaaaaatacaaaaattagccgggagtggtggtgggcacctgtagtcccaactactcgggaggctgaggcaggagaatggcgcgaacccgggaggcagagcttgctatgagcagagatcgcgccactgcactccagcctgggtgacagagcaaggctccctctcaaaaaaaaaaaatagtttcattgggattaaaaagtgtgtgtttcacctaatccacacaccttctccccaccttcctgggaaacctcaaatgtttactggatctatatttttatctttggcaaaacagcctggctgttctcttagcctcttttgcaaagcatcaagattcaccttcactgactacagcataaattgagcccagatggctgggggacagaggctggagtgggtggtaacagtgattgattcaagtggaagttctcagtgatattctgcatcagcataatgaagattcacaattcccagggacaccaattaccagcacagtctcccttaaaataatctacttggaagctgagggggctctcacaggggtaggcagtgtattactgtgagagacacagcgagggacatttctgtgagtccagacagaaacctccctgcagggagacaagagaggactttgtgataaatggtgcttaggacaccagggggcactcaggacagcagagggtgctcagcagagcagggtgcgctcaggacatggtgtgtgttgtagggggcattgctcaggatcaccagggggctctcagaaccaccaagggtcactcaggaaaccagggggcgctctggacaccagggggagctcagaaccaccaggtggtactcaggacaccagggggcgctcatgaccagcagggcatgcttgggactctatgaggcatgcaggagaagcaggccatgctcagggcaacagggggctcacagaaccacctgggggtgctcagaaccactaggggtcactcaggacagcagcaggcattcgggacaccatggggccctcaggacctgcagggggcgctcagaacaccaggggaaggtcagaaagacctgggggcacttggaaccaccagggggcactcaggacagcagggggcgctcaggaccactagggggcgctcaggaccagcagggggtgctcaggacaccatggggcatgcaggagcagcaggctgttctcagggtaacagggggctctcagaacaacctgggggtgctcagaaccaccagggggcacccaggacatcatgcggccctcagaacctgcagggggcgctcaggacaccaggggaagctcagaatgacctgggggcactcagaaccaccaggtggcactcaggacagcagggggcgctcagtaccacggggtgcactcaggacagcagggggcgctcaagacacagtgggatgctcaggaccagcaagaggcactcaggaccaccagggggcactcgggggagcaggaggcactcaggacaccagaagaggatcagaaccactcgggggcactcagaaccaccagggggcgctcaggacactgggggcattcagaaccaccagcaggttctcaggacacccagggacactcaggacagcaggggcgctcaggacaccagggagggtgctcaggacaccagggggctctcagaaacacctgggggtgaccaggactagcaggggcatgcaggacaccagggaaggggctcaggacaccagggggtgctcaggacagcagggggcacagaatcacgagggtgcattccagaccaccaagaaatactcaggaccaggggtaacagaaacacctaaagacacacaagaccaccaggaggcactcacgactgctcagagtgctgaggacaccagagcttcaggacgaacagggggtgctcaggccaccatggggggctcaggaaccaccagggtatcactcagacaacagggttctcttaggaggcagctccacatcaggtgcctggggagggtcagatttgcttttagaccttgctgatccctgatctggtcaagcgaaaaccttcccaggatctctcaccatttcttccttgtaacccatggtttctttcacgtacaaatcattaacttagaacaggaattcaattcaacttttaaccctccatatttttagaataacactagcagtaattgaatgttttgataataagaaattgcgtatgcctaattcaagctctggttccatgcatgggtttttgttttctttgctgtgtcagtcacactatagtcaatgcttttctaccaataactcagcataggcatagtgttaagtttctttttctttcatctgccttttgtggagatgaaacaccactttcagggctcagttcccccaccttggttgggttctggtgttctgctcctcacactatttctccaccttcccttcttctgtccaagccttttgtcttcctcagtctcctagcaaggaagcaacaagtccctttattttgcctcttccatgtctggtgaatctgttcacttctcttcatgatcattgaagtcaaccaagtttaggaggataacagttctccttagaatatgctcatctacctgcagactctctgccttcctcacccctttctagggtcctgcagacgtcacctccaccacatccactcctttacctaagtaccacagaatagtctctgcagctcctgctgctctctgtgtgctcagcactaaggctcactagtgctttgatgatgaagttcaaatccctaatgtgttagcaattctcagacaaccctgccattgtgagtgaattttggggatcctgggctgttttcagttccatattactggatgttctctagcatccaggagtactggcaaattaacatctagaatttgtattgcaaatttatacaaaatcaattgtagaaaaaaatcctaatttctaaataagaacatttatcctgacttttataaaaatacaatgtgaatttaaccaataatataatacaattttaaaagtgatgtttatcttatatgttattaagtttattaataattggctggtattttaaaagtatactgatagcaaaactgacaaataaaccaacacagattctatacataaataccattgtccatttaattaatgtgtttggccagaatggcatttacattcagttctaccgaggcatgtctttaaatgtatttgtttattggcattaggatagagaaacactcacacagaaaagcattatttgggactactacattatactataaaagagagtaaattcaattcaattaaataaataaaataaattgaataaattcatgttttggtttggtatttggataggtgttcatttttctattttcacatgtatatttcagtactgggcatatgtgtgtatgtgtatgcatgattatgaacttctaaaatacattactcccctatatagttatataaattgaagttttgcatgttaagagacagtagaaaccacaaaaggggaaaagttatagaaagcatttggaatacctagggcctacagaggagtcatattaaaatgaaaaataatagctgaatattttggaaatgacacatgcagtaagaaatgtctatatgaaattaacaggatattggcacaaaatttagaaaaaaataacatgattatgcccactattggtctatgatatgcctataataataacacattttatttatcatagaaaataaaataattatacaaatagcactctcattgcttgattttagtattaggtacttcacttgttttttgatagaaatgaacatttatcattttttgatgataatttctatattatcttctaaaattaatgtccataattatgattgacatgttataatttccagaaacctattttatcaattgtgacttgtatttttatgatagtatttttacattcatatacatttgattcagaataattgtagattaacaaaataatcataaagttaatacagtgtgttcccatctctaagtatctcctaagatgaacatcctccacaatcataaaacatggtgttaacacatttacgttgataactttaaatatattcaataccaggccttatttgagatttaccatttttccaataatttcttttgtaaaccaaaaataaaattctaagcttcctcatccaactaaatgaactcaactatcagccaaagatattttaaagtaaactttaaaacttgttccagcaataatgggaaaatgagaggtcagatatgcctcattatgtcctcctgtctttggaattaaggcacctgtggccagcattaacactaaaacaaagacccttagactgacaaaactatattttttctataaacactcttcatagtgaaaagataccaaattacaatatgattctagtatagcatcacatgacaaacagcaacgcctaaaaatctattctctatgaagtctgctacctggaggtttcatctacataataacaattatgagctccacaatctcgtatcttaatccagatactcatttgtaatgagtgtgtaacatttcaaccaattgccaatcagaaaatgtttgaattcacgtatgtcctggaagcacttgagtaagcttattctgcctttctggactgtgtaaatggtatagctcacatgtgttgattcatatctgtctataccttctgtaccactaaaatgtataaaatcaagctgtaaccaaaccattttggatacgtgtactcaggaactcctggagttgtgtcatgggccttggccactcatatatatctcagaataaactgtcttaaataattcacggtttgtctcttttagtggatactgtctttttcttttttctttctttttttttttttgttttttgagacaggatctctccttgctgttgtttttgtatatttgtttgttcccagattccaacaaggtcatcactttgaattgagttgtcatgttcctttattctcttctggcaaatcacagtttgtgtttctgaagttttctagtttaatattttatagataaaaatttatcaagtagattgatagtcctatttaggacacttatatctttacttatttgaacactgcttgtcaatcacaatgagtgttgatttctccgtcttctatacatgttattatattttctgttccaaatccattcattaagtatttttaaatgtattttggaaagttgatcctattactttatgtaatatttctcttgagtcccaaaggtcttctttttatgattattttgtcttaaattaacatagctatttaagttttcttttggtttatattttcatgatatatatttttccatctttattttttctatttctgaatatgtaaagaaattttcttggagataaataatagttgggtgtttttttttagtcaactatgaagaattattttttaatgatgttactcttttgtccaattattcttgttttaatttgtatttttacaataaagtttattgtttctattaacttattatttaatcattctgtgactaacattttatgggttaccataaggataacaataaaaagtttctataattgaattctaattcaaaaatttaattcccattcatatatactacagagatattataactctatatatctaattcctctttcctatcccatgttttttattttctgtttgtatctatacatgctataaaatgtaatattggcatttttataattgctttccacacttacataatgaacaaaatacaaatgcaaaaactgtatttcaacctcatttttccattgttgaccatcttctttgtgcatattttcaggtgttggatctatgtcacatggctattcatctagagactctgctaaaatgtctacggaaagattcatgtgctggaaataggttttctcaggttttattggtccgacagaatatttatttgtctttgatttattgtctccagagacaatgtcaagaatatgctatatctgcaaatgggcgatctgtaaaccaagaacacatcagtatatcactgtgcaagaggagcacatgagggaaagccagtgtgtgcccagacataaacctccagggacacatgggcgaattagctgcagggggagcttgggacccactgatgagagtcgaccccagagggaggtgcacagaaaggttaagaactgctttcctgccagtatatttttaaaaaaacaaaacttccatctgacagtttctccagagaacttccctaattttagcattctgtgcctaccaatgccatcactaaataggtttttaaaaaatattgtaatatgaggacatattctcatatggacaaaacgcaaattgacatttacagaaatgaaaagtcctcaaccgtggtcgctagaattggagacctgtagcagctcagtgggacctgttgagtcttctccaatcacactcagaacagagaccttagtgcatctccctgactagaataccctttaggtatcgagataacagcctaaagatggtaaatcatgagagtctcagatgtccagatgacagacatgggtctatgggaatagtactgtaactgacagtaactaattttccataccgccagatgtcctattcaggagcagctacagcagtcatgcctaggtgtgaagatcacacactgacctcacccatgctgtctctggccacttcatcacaaccaatgcttaatattggacgtggatctgccagtccccggggaatgggttgaatggataaaatgcatggctagtgctgctggaaacccattcctactgtggcaaatggcagcatctcttttaaaaggctaaataatattctattctgtatacataccacattgccattatcctttttgtttgtttgtttgtttgtttgtttgagatggagattcactcactctgtcacccaggctggagtgcagtggcgtgatttcaggtcactgtaatccctgccttctgggctcaaacaattctcctgcttcagcctccggagtatctgggattacaggcatgcaccaccactcccggttaatttttgtattttttgtagagatggtgtttcaacatgtttgtcaggctggtctcaaactgtgacctcaaaaaatcaacccacctcagtctttgaaagtgctcagattgcaggcgtgagccatagcatccagccacttttctgcatttttttttcattgacacttagattatttcaatatcttggctcttgtgaatagcgctgcagtaaacataggagtgcagatatctccacaaggtggtgattttttctatcttgggtatattcccagaagggaggttgctggtcatacagtagttctagttctaattgatttaagatcatcttactgctttccatagtggtggagattcagattagtgtagctattatgaaaaacagtttcaatgttggggagtgactgaaaaacaaataatgcttgattatggttctccatgagagtctctaataaacctaatggaagttcagaaagtttcctcaccttgttaagaaaacatttgttttgctcataattctctttcagcccagagttggcagtatgtagaatggaggctgttggctcgtttaaggattctgaagcaaagaacagtaatgagagatgacaatagagaaaaagagagagaaggagatgctgaatcatcatggactcattccacctgcaagcctttcactgtaaagctctattgctaaggatcctgaggattctatactcccatgaatgcataatcaggatccctcaattcaaattttattggcagagacacactgggacccctctaggatatgtgccctacattactggctcaacatgccgcactgagaatcctgcattaactggctttatttgtagtggtgagtaaagttcacagttttcagtcatccatgaaggggagattttttttttggttcatataatttttgcagaaattcaggtattagtgaaaaccaataagattgaggatttctggatattttagcaacactagggatgatggccattttgtagaaaaatttacatttttcaaactgacctacatgttaggctgacataaaaaaatccaactacacagcaatattatggcaacacttcaatacacttggtggtgaaatacctcagaaatgaaatgttacacagattaattgagttaatgaaactgttctgaactatgataaacatttgtttgcacccagatttgcttgaattcaatttgattattatattcagctgctgccctaacttatttgaatgagtaagttactatttaaatgaccctgtctgtttgatttgttatatatacatctgaattaaagaacttaaaggacaggtttgtgctattattagaaagagatattctggggggcccttgtttgctccaggaacctccacatttttaacttagaattaatataaattccttgtgaattgggtcagtcttcaagagacctaatctctaaaacatatacccagaaccttctccagacagaccatccagaggaagaatctttccagtaatttatctccatggtggaaggtccttcattgtcatgcagaaccctctgcccaggcttcctttattatgcaaataattaatattagccagtagggtaagattaaacaaaaatagaccggagatgctgcagacagggaaggaagtaatagaccaaaatcagctttattaatggagactgcttttaaaggtcacagccaagaaatggaagaggataaaatcaatgagatgaaattgtaagaaactttgtccagttcaatcaagccatcagcaaccagatagcttcagtggacattatgtgtattacaacatggctaaagattctagattacacaaggattttctctatagtttgcatattgacaaagtggaagatggcatgggagatctggtggcaaacacttaaggtgcaataatagctatttttcctatatcatgacaatacatggcatgcctctatattcatttcattccaaagaagtccttcagaaggtcaagtaaatggagaatcttacatgcatggcccaatgcagtctccaagaagtgattttgaatgtacagctacaccagttactgcaatgctgtgtctgaccttcccagcatctaagatattcatgagtatcaagggggagatgggtctaggtgaaagaaaaggaagtagtcattcttgagaagaatggtatggccaagataagcctgaactctctatcttcttccatttgctgcagcttcttattgcccgattgaggtcactcgcccatggtggtaatgacatcagcaatgcagtacattctctggtggctttgtatctggtttataatgtgggagatgtttcctcaagagtggtgacgccagtatggcttctgctctctggtggtgatggcatctgcattagcctaggggtttggagaaagagagttattcagaccatggggaagaatctgacactgtcacaccgcctggtgccttcagtactggactggctcctgccctcattggtgattgcatcaaatattggcctcctcatcagtacaacacattgtaacagtcttctttgtacctggctttaatccaagaaagttgttgacttatggctctttcattatattgtatggcctggtttgtcacaatctttatttctggaattatcagtgctgccatcttggctgacttcaagtatgtcatcctcacagtttgaagctgcttgacattaacatttttgtcaatgtttgggactaccttacatattccggctctctgaaagaatgattagcgttagggaaggctgacactaaatttgggagccagagaaggaaagtgttactgtgctacagttgttttgtgataaatatggttaggttaaaaatgagctatgtaatgtagccaggtttccactgagttccactttgcttcttggctgtctattcctgtgcaagtttctatatattttgtatcaggcttcaattccattatgttttaaatgttgtctctaaagataaacaaagattttttaaaactaccaaacatgcagccatttgacagagtgtgcgctgcatttttagtctcaccatcttctgccctaacaagcaccgaatctaacaacacaaatatcatggaagctttccttggagtagctcctgtaattagaatcattggtattctgccctcctgtcagtggtggaacgttctattggcacatgtggaaacctcttagagggatgagtttctttgaacacaataaaattttaagttaggaataacttatttgaaagcaattcattgaaggttattgctaagaagaagttagaagcagtcttttggcagtcatttcttcaagatgtatggcagcgtaggatggatatatgaagtggaataggaacttgggctagttaaatggaatagcctccaatgttaatctgtttaccttttaactgaatgaaaaagcctatagttgtaagaaaagaaaaaacaatacagtgctcccctgtcccacacattaccttctcatcagtataattaatctacattgaagatgagtgtggtaatgcagagactctatttagggaggagaacatagggaaatgcaaagacaatgggagaaaaaagtcaaggacagtagagcaattcgaagcctctgataccaatagcttgaggaccaaggtcatgactcaacttttggtggacacagagtcacttctcttagggaaactgcagtattctaaggtgacaatatgcaaacatgatgaatgtacacttgctacatctccaattgtgtactgttttccttacttctgtttgaagaagggagtcgtatactcaggtctagtatcagtgtagggggtgctccctatttgcaagatactagaaaaaaatggtaagttagaggcccattgttataaaaatctactagctccgtgtcagtgtgtgtgtgtgtgtctgtgtgaatgtgtgtgttattgaaacagaagacatggagtgggcattgatccacaagcatagatacctacaggcactcttagatgtaatatttaactgcaggagtctaaataaaataaaggattcgccaaaagtcttgaaaattttggtgctgactatgtgtccactgattcaatgcatcctgagttccagggaagggaatccccaattctttcatagagttgactgggtctcctaaggtcaatgttttcaaacgatggtgtcagtaacatatggtgtcactgaaagagcattttaaactagggcatggccacttcctatagccctagagacactgagaggtaaatgccctgtgagcccagatggaaacctccatgcagggcagaggcagtgctgcagggggcgcccaggacccacccagaacaggctccagccccagagctggtgcacaggaggctgcagagggagtctctcacaaggactgagtgttactttactgaaaaccaaaaaattataacatgctaaataagaattttatgaggactatttatgtatatttaaataccctaatgtatttagaaataaataaatcaataattcagtgagaaccacatttaaaaggcaaaattattactgctttgagatattttactagtaaaaagataaagaacaagaatggttttattaaataaaaatgtacacatttcagagacacactggtcccgagagtaagactgcggagagcaaatcctggaaagggcggaggctgtccatgtgccatgggaacttgggctcacgctgagaaccatgtccggtgtgagtcagcttcttagcggagaaattctcccttcacaaatttccgggcatataaagggaaacatgtcattaaataagaatgaagatttgtacctcagcatcccacagttgtgtggtccatgtgagatctattttctctttctcgtgctggatcaggtgtaatgctatgaagtagtagtcctcatgaatacgcaaatcacctgaggtgaacactacagataactctgtgccctgagagcatcacccaataaccacatccctcctctagagaagcccctgagagcacagctcctcaccatggagtggacttggaggatcctaattttggtggtcgtagctgcaggtaggataattctcagtccccaggactaaggtgactgggtccagtcaaagggggttttatccactcccgtgtcctctccacaggtgcccagtcccaggtgcagctggtgcagtctggggatgagatgaagaaggctggggcatcagtgaaagtctcctgcaagacttgtggatacacctaccttcaccagttactctatgcactaggtgcgccaggcccatgcacaagggcttgagtggatgggaaggatgtgccctagtgatggcagcataagctacgcagagaagttccagggcagagtcaccatgaccagggacacatccacgagcacagcctacatggagctgagcagcctgagatctgaagacacggccatgtattactgtgggagagacacagtgtgaaaactcatatcctgagagtgtcagtaaccctgagggaggaagcagctgtcccagttttcaggatatgacaggatttatggggtttaatgttgtttagaaaataggttatataattgaggaaaagaagaaatagaaagatatatgcattctaattatataagaaatattcttttcaaatctcaccctataagcaaaattaacagagtgggaaaagcagcaatcaatcaagctgaaacaaacattcccatggaggatttgtgggggcagacgttttaaaattgaatgggtaaatcatttagggcaagattgcttgatccaatactaagactaaatgtaatttctgagaaactgcctatctttttatattaaatttattataaagcagttttagggttacagcagatgtaaaaagtagaaacagagagctcccatgtacccctgcccaacacatacacagccctccccatgatcagctccctgaaacagagtcctaactgcgttatgtgggatgaacctacatggacacactagttctttcctttcctggtggtcccccggtataacaaacataaattattttgaagcgccacgggttcttcaagtgggttactgggaatgatgccagttagagggaaagtgggtggggccattcctttttgcactctttcttcaggaatccataaaatgcacattgacttagagctcatctgactcctggttttctatgccccttcccagagggtaagttctccaagcgtgggaggaaggtccatttcactaaaaggccagaagcttctggtgaattccataatgcacaaccttttttgagaagtggagactttggacatgagggatttcatgtatgatgccctggagttggattaaatacagcataagctcttgggggtatttctggaggaggccctttctgcaggaaattagaatacatgcaggggatccaggcaggaagaatcacttcctttgacatcgtttggcacctgaaggaagccctctcagcattgggcactggtcccacttgctggctgcactttagccagaggcctgcgcctgatcattcttgcagtgggagagccttactggggtcacaggttataaaaatgcctgtcactctccagctgagcaagtccatatgcgtgcttgtcagtgtcaaccccatgatgagtgcactctggaaggtgacaatctgcacacaaacctcctcccactagttacccactactatacactactttaaaaattaatacttataattatataatataatatatattatataactatataaaaatgattatgatgatgacatttggctgttgcaatttctttaggatctctgcatctctcttcactagacatgtaagtcttcaatttcttgtccctgtgacacgttgcccagtgtttgaagtcaaagttgtgccgagtacctgagtatgtcctcagagaagatctcagcaatggttgattgttctacagggacttttccaggagacctgtcccagggagtcatgaggttcctctggaaatactagcccctgcaggagatgagacggaagcaggagaatcaagagcaggtgacaacattgtcagcaggaggctccagatgctttccagacacagtgaaccttcacccacttgccacactgcacagggagtttgcaggggcacaatgaggtgcctgtctgtgggatgttgggggacaaagtgaaaacctgagctcagcatccaggaaagtatgaactccagccctgataatatgtagcctgtgttttctttccttctacgtgaacactttgccttattgttaagaacagaggattctagctctaagtgcacggattgcagacagctatgactttcctccgggccaggctcctcttaatgtacttcttggacttatttgttgatgaaggttggttccattaaataccaaaacagggttcatattaaagaaaaatgaaagagtgacaggtagattaaacccgagcatccagttccagtgattctttgaccctgccttcccaaaaatctccgatatgaacaatgacaatgccctccatggttagattatattataaactagattgagctagagtgtttggtgtattaagtcactattttttttagcttccctgttagttttttgtttgtgtgttagcatttactttaaaattctattaatcagttctctagtaggtagaaattcatctgagagtttcttctcttgttgtccactttgataagatttccagaagacataagaaccctttttgtttgcaaaaatattccaaagttttacactaactaggaacatatatacttaattctaatttttaatttgtttaaaagctctaataagtgcactgttttctgccttttgagttaatttcacaacacataggagaatatatcctaaatgaaagtttgtgctaataatacaaattattggtaaataacctctgttttaattattgaggtattatccattaatatataatcttaaattgatgttctcaatgggactcttacctaaagaatatacaaaatattttcctgatcttgacataaaatagatgtgaacacattcttagtattcagccatgtctcctgtctatcacattatgaaccacatgctaactttgatttacttgggacttgttctaatttcaaactagttatttttttatcttcatgcagctggattattatgtgtggctattttatcagagaatgataaagacaattttaacaattttcactgcaggcacgtctaggcaagccccctgtgcacaatgaccttcgtgggttggacattctatggggactctcccctgtctgcctaggagagttatctgcctcctccctctatcattttcctctttgaataagcgcatctaactgccgttagaatacagacaaaggccaaccttaactgctcccagctgacaggggatgctgttttgggaagatctcccttgaggtctgtctaagggacctagtaaaagggagccattatcccaggcttcacttggatgaccatttggagttgatgcctgaaggtgagaagagacaaaccaggttattagaagacatgtatcaaaaccaaacaaggtggtaaggacagtttgaaaaaaaattccaaggctgctgacacacccagataactggcggctgtagttatgcctgctaagatttgggtgcatggggcttggctttcgttagctccctaggacttattttcccaaacaaagaaacctccgggttagggggaccctatttattccagtcacctggcatgatttgcaggataattgctcagaattaaaatattcgtccagatgtttatatagcccatgcctgtgtttcttctgagctgcagccagagatcattggttcgttcacagcgataagcagagttagtctaaaatggaggcaaatacttaaaacaattggaagagactgtaatttaaagacaaatgtatgatatgttttgaaacataatttttctctctccagttctgatttttgtcagaaactaatcattataggactgagtgatttgcaaaataaactttagtcttgtggttggtctgatcatttgcataaagtggagcaataataattaataataattctgtaggaaaagcctgcaagcaccaggagcttcacagtctaacagtatgagcacatgcatcctccagcaactcactgaatattttcaagtcagctggttcttagcttaaataacatccagttggtatctgtcccaggaacactaatatatggttctctctgcaggcccctctcgccacagatttaaggtttatttttttcctctgtgatatcaactcagatatgttgaaggtttttcccacatttgtggtttttcaggtttgttgttaataaggtcagaataagatcatagtttactcatttttttacattcccatgctgagtagctacttttctctataaaatccattagctgagagaaaaaataacattttcctaacggtgaacaattaaatagtttgacatatatttgtgtaccagtatataatgcagcttcgaatcaaggtgtgcctcaatcataaaaaacatggctaaattctcaaagaattgtgctgagtgaaagaagctaaggaattaagagtaaattttatataattcattgtagaaatattagaagatgccactaccataaattaaaatgaagaagacttaaatttttctgagaaaatggtgttgggaatgatgcggatgtgatttaagtttcagaggaataaggaaaaagatttagggattaatttaattattcaaaagttgattgaagtgccgagtgaatggctgcaaacatagctctacatttttcaaatcattccctataaatctgaattaattatttatttattatacttgaataaagcaataacgaagaaataaatgaatatttttgctaaaatggagcaataaaaagactgatattgacagaagaaatatgactgacttctgaaaacacacatgaaccatggttctctctgcatatttaggtgaattacagaaagttgtcataacagatggggaatcctgcagacttcactaggcatggtccacgctgccctggagttgtctcaggggagctgcctcctccggtgattagagcacaggcccagataataggattacatttttttagatgtgtaaacttagacgcactgcacagctgctgtattctctatgtaaattatcttctgtaaaatacaacattaaaggctgcattaaatatattgtgtaaatatgtaaaaataaaatcagattatgagagctaaatgttaatcaaggcacaatcacataatataaaattatattttcctgaatgatggaattactaccaatctcccccaggagacttcatctgcactgggcccggcctctcctcagatgtcccatcacagagcttgctatataatgggggacatgcaaatagggccctccctctgctgatgaaaaccagcccagccctgaccctgcagctctgggagaggagcccagcactgggattccgaggtgtttccattcagtgatctgcactgaacacagaggactcgccatggagtttgggctgagctgggttttccttgttgctattttaaaaggtgattcatggagaactagagatattgagtgtgagtgaacacgagtgagagaaacagtggatatgtgtggcagtttctaaccaatgtctctgtgtttgcaggtgtccagtgtgaggtgcagctggtggagtctggaggaggcttgatccagcctggggggtccctgagactctcctgtgcagcctctgggttcaccgtcagtagcaactacatgagctgggtccgccaggctccagggaaggggctggagtgggtctcagttatttatagctgtggtagcacatactacgcagactccgtgaagggccgattcaccatctccagagacaattccaagaacacgctgtatcttcaaatgaacagcctgagagctgaggacacggctgtgtattactgtgcgagagacacagtgaggggaggccattgtgcgcccagacacaaacctccctgcaggaacgttgggggaatcagcggcagggggcgctcaggagccactgatcagagtcagccccggaggcaggtgcaggtggaggctgtttcctgtcaggatgtgggacttcatcttcttccaacagtttctctaatgaacctctctaattttagaattctgtggttcctaatgtcatctctacatattttcaaaagatcattttaacatgaggacataacctctcatgcaccaaatgcacattgatgcttacaaagatgaaaagttctcaaccattgtgaccaggatcgcagtcctgaggaagctcacgggtgtctgatgagtctcctccattcaggcccaggacagaaacctcagagggattcctggaccagaacggcagggattctgatcacagccaatagagaggctgggccagggtcagtgtcctgtagaagctcacagggttcaagtctgacccttctcctgaccctaaagccaatgagcatcagcactgatctggtgctgcttttgctcccaatacatgttctttctttggagtgtttgttctcccttttttatttgcttttctttcttcctgaaaaagaaacacatggtctctgtgatctacactccagggctcaaggcattttcttagaactcaggcaaggctcaggcttggctactccagccacgtgggagaggctgacgggatttccttctctctccatattctcagggccctcctctgtgttgtgtgtagactcatctgggaatgcaattggctgttagtagtgaaggggatgaactcatttgatcaaaatgggatgtggatgtggaattaaccctgttctatgcacactgtcagagtcatcttcttcagaagtagtgttagaaagagcttgtgaaatttatcggcaacaaaatggatccccttgtgttaaaaccctaatgaatgaagctggggaaggccatgaaggagggttctaacacatattcctgataagatgaactgtcataaatagactctgcacagccacaaccttttacacggagaccaccacagccttaaaagctttatttctccaagtaaatctgccctgcaactgcctgttcaaccttacaccgctgtctcaaaatagctgctgtcaccctcctcatttttccttaattctcttttttattattttttaaattatactttaagttctagggtacatgtgctcaaagtgcaggtttgttacatatgtatacatgtgccatgttggtttgctgcccccattaactcatcatttacattaggtatttctcctaatgctatccctcccccttcccgccaccccatgacaggccccggtgtgtgatgtttcccaccctgtgtccacatgttctccttaattttttatcttccttttcctacctgaatgtacccatacatattttaattgaaatgcacatcctggaaaaaatattattatactttagagtctctttctgtctgttattcaggttgacaagctgcagacggacatgccacatttctgtgagacatagaggatgacagtttttggagatgtctaggaatctccaatgtccataagatcagccatcaataaatgcagactggaggtcccagagagaagtgaagctgctgaatcgccgtggaatttcattttctccagttctgctctgatggaatcaggcccaccaattttatcaatgacaatctacctaacttagagtcaattgataacagtattaatatcatctattaagtaaattcataactatatatatagtaagagagggagagagagagacagagtctcgctctgttacccagggtggagtgcaatgtcatgatcttggctcactgcaacctctgtctccggagttcaagcagttctcctgtctcagcctcctcccagtatctggaaatacaggcacacaccaccatatccggctaatttttgtatttttagtagagacagtgtttcaccacattggtcaggctggtctcaaactactgacctcaggtgatccacccgcctcagcctcccaaagtgctgggattacaggtgcaggccaccaagtccggctaatttttgtatttttagtagagatggggtttcacaatattggtctggctggtctcaaactcatgatctcagcctcccaaagtgctgggattacagatgtgagctactgtgcccggccaacatcacctatattaatgttggattgaataactacaaagtctaccctaaccaagtgtaccatcaaacttaccattacccagagggaagaatctttaacatgagatcgatttcttaagtgttttaaggtgcaaaactgaccactgtacaatcacccaattatgattttgctaatgagttgtagaagttgcatgtacattttggatattaacactttttcagatgcacagcttataattatattctctctttctgtgggttggaaattttttccatgctttgcagcatctttttgctgtgatgtagttctgcttgttcaattctgcttttattgtctgtgcctttaatttgaaatataggaaatcattcttaatattattttctgggtgggggaaattttacaattgcaagccatacgtttaagtatttcgcccatttagagtaaattttggtatttaatctaaactaaaattcttaattctttgcatgtgtagattcagtttttctaacaccctcttagggagagactttgattcatccattgtatattgttagttctcatgctgaaaatcagtttgctgtagatatattagtttatttctgagctctctctatatattaatgccaataccatcctgttattatttatggatcaaaatgtgcatatttgtgaatttcaaaatgttgttcagaacttgtgcatgccaacaactgtgtttctcctgcactcttgggctagtgaagctctcacagaccctctctctcacctgtgctgtctctgcattctccatcacaaccagtgcttcctgctggagctgcatccatcaccccccgcaaggaagggactggagcgaatcaggtgcacaggtcatgagggagtgcacattccaacccactcctcaagagtccagtcactatctccagatccacatccaaaaaacagtgtttcctgtagctgagctacctgagcaacaagtacacaaccatgaattttaatacaaaagacacaacgaggggaagtcattgtgagcccagatacaaacctccctgcaggggagctcagaaagagcaggaggcactcaggacaccagggaacactctggacacatcaaggcaggtgcaatggggggacaaggggctggagatggggtttggcatcaccatcgtatttcaccactggacacccaccaccgtgtttattctcatgtacctgattctgtgtattattagaaaatggcatttatataaatatatagccatatgtaggtgcatcaagttgtcctctccatcgtatgtggacctttccactaagactctgagtccctgtatttatatgagcacctcataaattatggtcaattttgtgggatctctatcttttctttctcccttcttccctccttctctctcactcacaaactcacacacacgcaaaattctacaacttcagttacgtgatgtgttgaagacagtttataatgtgcagcttttccagtttagctgatgttcatattgctgtgagaataggaacattgtgtttctcagctgtgtatttctctaaggtagcagcaacttttttttttaatttgacattttttaaaaattttattattattatactttaagttttagggtacatgtgcacaaagtgcaggtttgttacatatatatacatgtgccatgttggtgtgctgcacccattaactcgtcatttagcattaggtatatctcctaatgcatttttttaaatacccagatactgaaagcaatccaaatatcaatcagcagcttaatcataaacaaattgtggtaaattcattccctggaaaatcacccactgttacattctggtaccgctggatacgttcaacagcaaaggtaaagtcacaagtacatatgatgagtcaaataagacaaataaatacaagtacacacatacaattcctcttttataaattctataaaattaataccaatctaaagttacataaagaaaaccagtagttgactctgggtgtggtgtgagaaggaaaggtgtaggaacaagaaattacaggaaaacaagaggaaattttgagggcacttgagttttttctgtgttgagaaaggtaatggttatgtcactatttgtcaaattgtgcacattatgggatggctattatttgctaatttcacctcattaaaatatgccaaatttaaacacatataatttggtagaaaataagttagacagagatgaataaaatatatgagaaataaaaaaagaaaatcacagaacgttggcataaggacttcactcatcaaactgaagaaattttaaatttctcaacacagaattaaagatttaattaaagatatatgagaaatcaaagactcctggatatatacatgaataaaccctaagcctacctatatttttagggaaacactagaatacaacaaaataatgtcatgaattcattacataatgggcgttaatcaaaccccaccaggcatgtccagctgtgtcctggggttgattcagggaacaggtgtgtcctgtggttaggagaagtggcaacaagctcacagcatctgttctagttgacaccataaaaaggccaagagatcacaaccaaaatgtagtgtggatgtcacatctgtgagtgccgcacactcccccatgtgaatacgaaaaggttgattacctcttgaggtgtctgctgagagtagagctggtctctcaggaatgtccaaaatggctcgatagagcaagaaaggagactggctcaggttgctataccagtttggtggtggaggcagagtgagggttctcactcacagaaatgggtttgtggggtttgaacctccaaatggcatcaaatgagggagttcttgtgattcctaactagatccacctcgtgtcggaaagaaaggagatgatggaggaatgagccttaagttatcagcagtcagacatcaaaacaagtctgatgacttattctatgtagcaactataaataaatgaataaaaatagatcataatgaattattcataataaatgaataaaaatatgaataaaaatagatcagtgtccaatatgggtggacaaaaaccagtctacacaaaacaagaagactgcttataagaataagcaaatcataatgaaaaggaggaaaatgaggtgaaaggcacggggcaggggattacacaagggtcctgttccaatgtcttgtgtggagacttttcattacctaaaatcatccgcttgttctgaatgtcttaggtgagctgtctgctccaaaacatcagaagcgccagaggattcatgaggatattcagtttaatatcttctatttaaggtgccttacaatagtgtaaaattcttaattattattattataataagagatagggtctcactgtgtcacacaggttggagtgcagtggcacaaccatagctcactgtaaccttgaacctctggctcacacaatccttctttataagcctcctgagtagtgaggacatgagaccaagctgatttttttttaattctttcatagaagtggggtctctctatgttatccaggctggtcttgactactagtcttatgtgattcccctggttttgcttctcaaagtggtagaattatagacatgagccacgatattcggtctgaactgattctttagttgcaaaatatcaacccaagaattgactcccttaatttttttctgcagtgttttggttaatattgcctgataaaatttattctaatttgtttcaacagcagaattcttcctgacgttttttccaatatatgtattttcatggttgaagatcacaaaatactgttaaaacatgacataaaaaggcaaccttaaacttttggtgattggagttagtataatacaaaaattacgtccaatattgtgtaacacacacatgcaaaaagacgaaggtgagcaatgagggtaaactttctaaatgtatgaatcttccagctcccaagtcataggatagtaactgatgtggcctgagggaggtaccagagtgacacagtgctagtggcataactcttggccaagagactttcaatattttattaaagtttttatatttttttaatttaatgatgccatttttttcaacatattcagaatattgtgagtgggattgattctggatgatatgaacaatgggaatgccttctatgtttagataatattaaggaccaggttgagattgaaagtttgtagaaatgatgcaccataacattattctagtttccatactaggttttttctctttgcttgcatttcatttcaaatttatatgtcagatatctagaatgtaataatttatttaaaaatttcttttcttgtagtccattttgatggggcttccagaagatttgaaaacctcttctgcctgcaggacattttaaaattctgcactacagtaaaacatctgtatttaatcatggtcttcggtttattgacaagctctagtaagtgcaataacttctgccttctcggctgattttacatcagatagaggaatttatcttaaatgaaagtttgtactagcaatataaattatgagttaataaccaccacctttattatttaggtgttattcatcaagaaataatgttaaatcaaggctctcaacgggaatattatctaagggatgcacaaaatgttttgctaatctagataaaatagatgtgaacacactcttagtatccagtcatgtctcctgtctgtcacattattaaccacacggtaactttgacttcacttcggactcgttctaattttcaaattcgttacatattaagcttaatgtctctagactattctagcagagtgaagaaagacaagctagactgacaaacaacctaggatgacaaacttcttgtcactctctataagaacttgcttctccctgaacttcagacttgtcgcgtgttttgaaacattaattatcaaaagtattaaagaaaatttgcaaagctacatcttctatgtttatgttattgttgatgcaattgtaaaaaataaggaaaatgtattccttttctatgtgcgtttccaaacttaatagcagatttttagtaagacccagaataataaaaaattcaaatattgttcagctgcttaacagaaaaacaaattatggtaaatttgtttgctagaatgctatccagtatttagaataaataaatgtctgctatacccaactataaggtaaaatatcgaattacatatgttaagtaaaataagccaaacaaataagaatatatactgcattgatttgtataaattttaataaactaaatgactcagccgcaatgtatagctcaggagttgccagagaaatggtagaagaatgaaagggaaaaggaggaagaatgtagaagaacaaaaggaaatgttgagaattctcttgtccaccttgataacaatgatggttacattatatttatcaattgtacaatttaaatatgtgaaagtttattatctgtaaactaaaactctcaaaatttattacaagcaaacaaatggaaacttagacaaagaaggagtgatagaaagatagaaaaaatgtatattaaatttcagaaatacctaagaacttatctgcctgaaccctagttctcaccatatttttaggtgaatgctagaatgcagcaaaatcacacgtgttctcactacagaaagtgggttccacaaccacactaggcacgcccagctctgtcctggagttggctcagggagtaattggggccagtgatgaggagcacaggctcaggtactggggcttactcatccagacgtgagctcttagacacatacttagccctttctccatgcgtggttgacttccacatctgtacatggagaaacaattgactccgacaaaacataatttgcacaaatatgtaaaaataaaataggatgatgaattcaaaaagtttatcacagcataattttataataagacagcatattttctgagtaccatcgttgtcaccaaattcttgcagggcacagtcattttatctgggtactgccttctcgtcaggcttcccaccccagagcttgctatatagtaggagacatgcaaatagggccatctctctgctgaagaaaaccagcccagccctgactctgcagctctgggagaggggccccagccctgggatgcccaggtgtttccacttggtgatcagcactgaacaccgactaccaaccatatgaagtctgggctgagccggtttttccttgttgctattttaaaagataattaatggtgaactagagatacttagtgtgaggggacatgagtgagagaaacagtggatagtgtggcagtttctgatcacgatgtctctggaggtgtccagtgtgaggtgcagctggtggagtctgggggaggcttggtacagcctggggggtccctgagactctcctgtgcagcctctggattcaccttccgttaactactgcatgcagtggatctgccgggctccaggaaaggggctggagtgggtaggtttcactaaaaacaaaactaatcgtggaacaacagaatacgccgcgtctgtgaaaggcagattcaccatctcaagcgatgattccaaaagcatcgcctatctgcaaatgaacagcctgaaaaccgaggacacggccgtgtattactataccagagacacagtgaggggaggtcagtgtgagcccagacacaaacctccctgcaggggcgcgcggggccaccgggggcggtcaaaacccactgaggacaggacaggtcccaggagcagatgctggggtagttttcctttctcatcagctggagaagtcaggtttgtatttgcaggactctgcagcattctaggctgtgacattttatcacttgtatttattatgactttattatcgttagtatttaaattttagtaattattaaaattatatataagtacattttaaatatgtactttgaagatataaatattcctaattatttgcactgattcttccagagttttattaacatttgttgacatcagcaactacatagctatagggacataaatttataaacatagaaatatgtatcggcaagacatggtggtctgtgcctgtaaccccagcttgggaagctgaggcagaagtactgcttgaacccagaaggcggaggttgcaatgagccgtgatcgcaccactgcactccagccgggcaactgagactccatctcaaaaaactaaataaataaaaagaaagaaagaaaaaaagatgtacaaatacacagacctatgcatatatgtgtaggcattcatattaaacattaagataaaataattctaaaaacatgtcctgaagaatcaaaattaatgatgaactaaatataaattattagagtaattcataattgattttggttatttttaattgtttacatgttgtgattttacacaaaatattagtcatttatcctgataaaacaggtcaaaatgttatatcaagagtttatttactttgtattactaataatataaaatgttccacatatttttagccatgttttacttatctgtgaaatgtgtttattaatttttcattttaatatgtcacctttatctttctaatttcctggatttaattccactacagctgaatgcattttaataattattgtaatcacatttacattttttatttgaattttcatatatattttattaggattttaatatcaatataaatattttcctaccattgtctattttctatttttatgatataaaattaacataaaaatgcttagattttcaatgtacagcttgagggcttctgacaaatgtgcgcacaaataagaattatttgcttactttttagtgtatactgaggagtgggattgctgggtaaaatgatatctctgttttaagttctttaagaaatctccagtctgctttccaaaggggcaagattaacttatattcttctcatcagggtataagtgttctcttttctccagagtcccaccagcattcattgttttttgactttttcgtgatagccattctgagtggtgtgttgctgcacacctacaatcatctcatatttgataaggctgatgaaaacaagcaataaggaagggactccctgttcaataaatggtgctgggacaactggctagccatgtgatgaagattgaagctggacgtctactttcaacatacataaaattaactcaaaattgatgaaagacttaaatgtaagacctcaaaccataaaaatccttgaagacaacctaggaaatactcttctcgaccccaactttgacgaataatttttggctgagtatccaaaagcaaattcaaccaaaacacaaatagatgagtgggacctaattaactaaggagtttctgcacagcaaacccgccaggagatagatgctcaggacaccagagagaactcagttaaaccagggggcgctcagaacagcagagtgtgctcaggacaccagggggcgctcagaaccaccagcaggagctcagaacagcagagtgtgctcaggacaccagggggcgctcagaaccaccagcaggagctcagaacagcagagtgtgctcaggacaccagggggcgctcagaaccaccagcgggcgctcagaacagcagagtgtgctcaggacaccagggggcgctcagaaccaccagtgggcgctcagaacagcagagtgtgctcaggacaccagggggcgctcagaaccaccagcgggcgctcagaacagcagagtgtgctcaggacaccagggggcgctcagaaccaccagcgggcgctcagaaccaccagggggcgctcaggacggcaggggtcgctcagacaccacggttcccttaggaggcagctccacattaggtccctgggcagggtggggtttcctttttgaacttgctattttttgaccttgtaaagcaaaggtcttccccaggatctcttagtatttcttccttgtaactcatgtcttgtcttgttttgtttttgtttttgttttttgtttttggtcatctacaaaaacttaaacttagaacagttgattcagaaaggcaggaaagcaggcattcctctaagtctcccctgagacaaatacatatatgatttcttcctccccactataatttatgtaaaaatgaagattcactgagtcagactaaattgtgtattcagtggaaggataataaatgacacaaaagaatgcaacctattgtctcttatcttcttctaacctgcaagcccccattttcatttgtcctggcttacaggaaaaaaaaatgtacatttcacatgtattgactgatgtctcatgtctctgtaaaatgtataaaagcaagctgtacttcaatcaccttgtgcacatgtctcaggacttcctgaggctggttatggttgggttcttaactttggcaaaacaaatgtattagtctgttctcctgctgctgataaaaacataatcaagactgggtaacgtataaaggaaagagttttaattgactcacatttccacgtggctggggacacttcgcaatcatgtcagaaaaggaagggacatcttacatggtggaagactagagagagcttgtgcagatgaattcccctttagaaaaccatcagatctaatgaaacttattcactatcatgagttcatcatgggaaagacctgcccctatgattcaattacttctcactgggttcttccaatgacacatgggaaatgtgggactacaattcaaaatgagttttggatggggacacagacaaaccatattaataaacttcctaaattgactgagacctgtctcagatatttgttgtttatcctactcatgtacagccttcagagttccaaagcctatatcagttttccaggattgtttcccctttttgttggttatttcctcctttattttctatgtttagttccctttttctcccactattttttcatcattgggatgtgagacttcacaacatttgaaaggtaggtaacaatgagctatcttaacaacatgggacctgtttatctaagagtaatccattctatcaatgaaagataaaacaaaacaggagaccagaaactcatttggttgtaaaatgcttcctctgaatgattttgaaaaggaacaggtggggaaaatataaaaggaaaataaaaacttgtgctgtcaattcattatgtcatgaggggggaaaatcctaaaggatgatccatgcaagaaactgattttcctttcattcctaagagaatagctacaaataaaaagttaaatatcttcacagatagctactctttgttcattttactttatataaagtgctaacttagttcaggagaactacataatttttctgtttccctatgtgcttctctctcattacaacatgtaaattttcatactgtccctctttcccctctatccagctttccccccttttttgtattgaaagccctgaaaatcatctttggggaacggcactgaccacaaatttttctgtgattacttgtattttcattccaggcatgccctaactttggcaaaattaattttaatttgattgagatctgtctcggaaacctttggtttacactaggaaagatcccaaattacgagtcaattactataaagctcagccttcccactgtgtatgtgtgtgtgcatgtgtgtgtgtgtgtgtgtacacgtgtgttttaatttttgtgggctttgagccatgtagttctctctgtggacatactatttggcgtgatctttgaatagagaattctgaaagaaataagaggctcctatgagttctctgaaagtttctggactcaccatggatcttgactgtgtcattgcatctgacagtcccagggaacagactctctggtggtttcaaagaatctgtgcttgggctccccctgcagtttactgggtacagtaatgttaaatcactgtttcgagagacaatttcgaaagcattagatgctgctgagagaggattgtgaaccaggggacagccccttcattctgggggagcgacattgggagaatatgctctgtgagcccaaacagcatcctcccctgccgggtgagggcagagctgcaggacaggcccagaaaccactcaacacagatgtcagccctggagcagctgcagaggagtctgaggagaaaattttaccagcatctgaattacacttatttcaaaacaaaaatgcaattaaaaagttaaaataagtaattaatgtccaggcacagtggcttacacctataatcccagaaatttgggaggctgaggtgggaagatttccaggagtttgagatcagtctgtgaaacatagtgaggcttcatctttacttttgaaaataaaataaaataaaacataaataatttagcaaaaactaccgatgtgtcttccatatcccatcgtacttagagcattgatgtaacccaatgagtcaatgagaaccaaatttgaaaggagaaaattttagagttttcagatatcttaagagttggaagatgtagaacaaaactaattttatcaattcaatgtgtgcaaacatggagagacacactcatgccagtagttcaacttgcaaagggcaaaaaccaaaaaagtttgaagttgctagtgatccatttgtaggtgagatcattttgaggatcatgtcctgtgagaggctgtttctctattagaggagttctgtgctcatgaagtgctggacatgctaggggacaaatatcagtaaacaaacatcagaacttgaatgtcagcttccccctgctgcattctccgtgtgtcatctctctgttatttctcatgctagatcaggtctttagctatgaaatattccacctaatttacatgtcaatagcttgaagtctactgagtttaattcatattttttctatatgttacagttacagtttgtccacaaggacaaggtttgtccacaagtttgtccacaaggttacagtttgtccacaaggactcaatcatagaagtgcagagtccttttcgggccacatttaattcactttatcagtgcccttcagtatgtggttcctgagaatttcacatgacaacacatttaccacactggaatttaagcaatccaacacatgtttgtagctttatcttgtaataggctgtatttcatatggcagcctctgcttcagtttagctaacactatggctttgtttctctctacaagaacttgtttctcccaagatttccatgtttgtgaaaggaaaagaaatctctgggacccccaaatcactaagccaaagggaaaagtcaagctgaaaactgcttggggcaaacccacctccattctttccctaaaatgatagctactaactgtcaggcctctgagcccaagataagccatcatatcccctgtgacctgcacatacacatccagatggccggttcctgccttaatggatgacattccaccacaaaagaagtgaaaatggcctattcctgccttaactgatgatactatcttgtgaaattccttctcctggctcatcctggctcaaaagctcccctactgagcaccttgtgaccccctctcctgcccgccagagaacaacccccctttttcctttacctacccaaatcctataaaacggccccacccctatctcccttcgctgactctcttttcagactcagcccgcctgcccccaggtgaaataaacagctttattgctcacacaaagcctgtttggtggtctcttcacatggacacgagtgaaactaaggttttaaaaaactacatacctccttcaaaatttgaccacaaggaaaaaccttgtggaccaacaacagacagagtcatttctctgctcacataagtcaaatgcctatctgattgccaccatttctctattgttttgctaagccagactaaggcctacgtgactattcctgtaaattgtgcattcagttaaaggctaatcagaaactcaagagaatgcaagcatttgtctcaaacctacctgtgatctggacgctctctccccacttcagaaagtcctgcctttctgaaccaaaccaatgtacatcttacatatattgattactgtcccatgtctccctaaattgcataaaatcaagctgtgtcccaccaccttgggcatatatcgtcaggactccctgaggcggtgtcactgccatgtccttaatcttggaatacgaacttcctaaatctattgagattagtctcaggtactctttggattacaggtttgttttttatttcataacttcaattatctgaaatactaaacaaaatttgccaaagtgtacattctcttgttgctgttgttgcaaaaaatatatttatgtaacttatatataatttatcatctatgtgtgttaccaagctgagtagcagatttattagtaagacttagagagagtaatgaaaaattcaaatgccagttagtaacttaatagaaaaacaaattatgctacatttgtttgctgaaatgctacccattatttgtaagaaataaacacatgcaacataaaagatttaattctcagtatttctattgagagaaataatccacatacataagagcatatactatattttttcattcttataaattctagaatataaaagctagtcaaaagacatgtgaaaacatcagtagatttataaagaaatggtagaagaagggaaggagaaaaaccaaaaaaatataaaagagcaagaggaatgctgaggggagttgacttgtcaccttcttaaaaatagagattttatttttcaaagtttactattgtacagaataaatatgtgaattttcttatctgtcaattaaacctcataaaatttattacaaaaaaactgaaattttagacaaaaagagggtgataggaaggaacaaataaatatgttaaatgtcaaatatacctaaaaatttatttgtctgacccctagttttctccgtatttttaggtaaatgcagcaaaatcacacaagttgtcgtggcaggaagtggattctgcaaaccacactaggcccgtttatctctgtcctagagttggttaaaagagcaactgaggccagctgtgaggagcataggcccgggtactaggactcactcatgccagatataagcccttagacacatacatagcccctccatgtgtgggttcacttttacatctgtacatgaagaaaccactgattcctaaataacataatttatacacataggtaaaaataattaaaaatgtgatagttattaagtgtttatcacacaacaatttcacaataaaacagcattttcccaaatgtaatcattgtcatcgaaatccccaaggacactctcatctgccctgggccctgccctctcctcaggcatctcaccccagagcttgctatatagtaggagacatgcaaataggtccctccctctcctgatgaaaaccagcccagccctgactccgcagctctgggagaggagcccccgccctgggattcccaggtgttttcatttggtgatcagcactgaacacagaagagtcatgatggagtttgggctgagctgggttttccttgttgctatttttaaaggtgattcatgaggaaatagagatattgagtgtgagtggacatgagtgagagaaacagtggatttgtgtggcagtttctgaccttggtgtctctgtgtttgcaggtgtccagtgtgaggtgcagctggtggagtctggggaaggcttggtccagcctggggggtccctgagactctcctgtgcagcctctggattcaccttcagtagctatgctatgcactgggtccgccaggctccagggaagggactggaatatgtttcagctattagtagtaatgggggtagcacatattatgcagactctgtgaagggcagattcaccatctccagagacaattccaagaacacgctgtatcttcaaatgggcagcctgagagctgaggacatggctgtgtattactgtgcgagagacacagtgaggagaagttaatgtgggaccatgcagaaacctccctgcgggaacgctggggaaagtcatctgcagggggcgctcaggagccactgatcagagtcagccccagcggcaggtgcagatgaaggctgatttcctgtcacgatgtgggacttcatcttcttaaagtttctctactgaacctaagttcggaattctgtgattactagggtcatttctacatatttttaaaatgattgttttaatatgaaaacctattctcctatgcagaaaatgcagattgatcctcacagaggagatgaaaagttctcaaccatggtcaccactgtcagagtcctgaggaagctcagggcttcctggtgagtcttctccagtcagactgaggacaggaactccagaaagaatcctgactagaactgaggtattgctcctcacaagagaactcaagctgcggggggtctgttcctgcagacccctgacccggtggcggatgaataaaacgtacactgacacacagatattctgttttgccagttcagctgagggtccgaggcaacttacagactccaagaagaatcctgtaaagaacggcagcagtggccctgagcagctcgcactccaggcgtgtattgagtatagaattaacaacagaagctctgacaacacacttgtggataattaacatggttaagagagtagttctacgaatgattaaagctcagggactgcggtctaaagtaaataccattagggggcaataccctggttagttaatggaggtagggtaaccagacttaactggggagccctctattgtccctagtatttaccctatgcctaacgctctaaggtaagagctgcccaccttcagcctgttcaattattacaagctatgtaacctttcggccttctagagaggtatatgactattccctataactttccttaatattcccctttaatatttccgccaccatcctgagtgaatcccagcaaggacagtctttggggattctgattacagaaaaaagagagcctgggccagggtcagtgtcatgtagaacctcacaggtttctcgtaggacccttctcctgacactgaagaatgcaaatcagaatcaatactgatctggagcttcttttcctaattcatttactgtcttttttagatgttgttctcatttttccatttgcttttcctgctttccgaaaaaggaagatgtttttgctgtggtcaaaattccagacctcaagcccttttcttggcgctcaggtgggtctcaggctgtggctgctgcagtcacgcaggagagtctggtgggactttcttcactcttcgtcactcaggaccctccactgtgttgcatggagactcatctggaaatgcaagttgccagtgggaactgaagggacaagcttgtctggttaatgtgggatgtggatgtgtttctaatcctgttctgaaaaaccgtcacacagtaacgttcttcactagtggagaaggaagtgggtgtgaacgttgtcagaataaaaatggagccacgtgtgttataatctttacaggcgaagctggaagaggtcatgaatagagggttctcatgcacacatccctgataacaagaattaccctaaaaatactctgcacaaccacaatcttgaacaaaggctaccacaacaataagagaattaatactgaggggatatctgccctgcaactccctgttcagccttaaactgattctacccttgttattgattcttctaccccaggataattgtctcaaaatagctcaggtaatcttctcatttatccttcagacacttgtctttctttaccaacctaaatgtgaccatggataatcccattgcaatgctcattttcaaataaatacgatttgattttggagaatctctttctctctgatgtttaggtttgacaagctgcagagggacacaccactttcctgtgagatgtaggggatgacagttttgggggatggctggaaacgtgcagtatccttagggtcagccatcagtaaatgcaggctggaaatcttagaaagatctcaagctgcttaatcaccacggagttttaccttctccagatctgttctgatggaatcagggccaagtttgttattgatgataatctacctaatattgagtcaactgatcacagttttaataacatctatttaaaaattcacacctggattagtgtttgatcaaataactacaaagtattgcccaaccaagcataccatcaggcagactgttacccacagagaaaaacattgaacatgagtttgaggttctcacattgttaaaggtgtaaaaccgattatgtttaaattatgctatttttattattgttattgagttgtagatgtttcatttacattttggatattaacgctttttcagattcatggcatattatccaattctgtgagttggaattattttgttactttgcggaatctttttttaaatctagtcccacttgtccaattctgtgtttttttatttgtttgaatgtaaaatccagaaaaagattgctaattttttgagggttgagagttttacaattgcacgtgtttcatttaagtatttaatgcatttagaattaatttttttgtttattctaacctaaaattcttaattctttgcatgtaaatatccaattttcataacacgctctttggaagacactataatttagcaattatatattgatggttctcacgctgaaagtcagctggccatcaatatgtgggtttatatctaagctctctgtatgaatttatgcgaatgccattctgatttattactgtatgtttctaataaatgttgaggcctggaagtgtaatacctcaagctttattcttgccttgttacagatattagaccaaaatattctaaaattttactattgagtataataatagctgtggcttttgttaattggtttcattatgtacaagtagttttcttgtcttcctactttgttcagagtttttataatgaaatcctgaatttttttcaagtgttttctgtgtctgatgaaatgttactgagatattttttctttagttttttaattaatcaactgaattgattgatttgagaatgtcaaatcatctgtgcatctcagaataaatttgagttgatcatggtgtatggtcttctataaaatctttagaatttattttactattgttggggggttaatttatgtctactaatgatattggtctatgattttcttttattgtggtgcctttgtctattactggtagtactctaacggtagcctcatagaaagagtttggaaggtgtgttgcagactacctttaaaatagattttatcagtggagaaacggtgatagtttttttcttcagttttctgttgggaagagttttgtttgtttgtttgttttttgtttttttgttttgttttgtttgttttttgagacagaatctcgctctgttgcccaggctggagtgcagtggcagaatctcggctcactgcaagctccgcctcctgggttcatgccattctcctgcctcagcccccaagtagctgggactacaggcgcctgccaccacgcctggctaactttttgtatttttagtagagatggggtttcaccgtgttagccagaatggtctcgatctcctgacctcgtgatccgcccgcctcggcctcccaagggaagagttttatgttgtttaaaagatattctgaataacttaacctgcttaatgggcttacataatattcctttcttccattctttttaaagaactgcttacctttcctaattatttttagggtgatttttcacataaagattgtgcaatacattttgaggtgagacttagtggattttctctaatgaattagaaataataaatcacttaattgactattgtattaaggttgatttgttgaatatttgctaaaggccagttctttaagctgtgccatgtactaaatccctaaccgactattttattcaggttggtttgttgaatatttgttagagaccagttctttacactatggcatgtaataaattccaaatggcagtacgtcattgtttacttagcttttgtgcttatatttttcagaggaaaaaaaatactgtaaattgtaaatacccaatacctaacagtattgtatgcaaatctgtgactgttggcagtgtcatctctgagaaacagataaagtttatttactatatataaaaaaagagtttggaaggtggactcctcaccaatttttgaaagagttagagaagcattagcattaattctttaaatgttaagactaattttatgatgtaacatataacctatcatggagaatgttcaatgggtgcttgagaaggatgtgtattacatggctcttggttggaaggttctgtaaatgtctttcaggtaaatttgttcaatactgttgttcaagttcagaggcttattaagaattttctttctggatttgcaatacattattgctaagtgaggtattaaggttttcccttatttttatatagttttctatttctctctatatatatatcttaaagtttgcttaatgcatttatatttgtatttgtactgtgtaaaaagtaaaataaaataataattgcttagtgagtttcatggcacaatcacgttatgaataatcatattttcccaaatgctgtcattgccactaactcctccagatacatggtatattatccaattctgtgagttggaattatttcgttgctttgcagaatctttttttgttaatctagttccacttgttcaattatgctcctccgggagtctcacatctgctctgggcactgccttcttctcaggcatcccacactggagcttgctatagaggaggaggcatgaaaacagggccctccctctactggtgaaaacaagcccagacctggccctgcagctctgggagaagagccacagccctgggattcccaggggtttccatgtggtaatcagggctgaacacagagctcactatggggtttgagctaaccagaatttttcttgttgctattttaaaaggtgactcatagagaaatagagtgagtgagagtgagtggatataagtgagaaaaacagtagatgtgtttggcagtttctgaccaggacgtttgtgtattttcaggtgttcagtgtgaggtggagctgatagagtccatagagggcctgagacaacttgggaagttcctgagactctcctgtgtagcctctggattcaccttcagtagctactgaatgagctgggtcaatgagactctagggaaggggctggagggagtaatagatgtaaaatatgatggaagtcagatataccatgcagactctgtgaagggcagattcaccatctccaaagacaatgctaagaactcaccgtatctccaaacgaacagtctgagagctgaggacatgaccatgcatggctgtacataaggttccaagtgaggaaacatcggtgtgagtccagacacaaaatttcctgcagaaagaagaaaggattctgggccgaaggggacactcagcactcacaaaacaggtggagccccagggcaggtacagaaaagcagtcaagggctgctgtccttcaggatctgtgctttcctctgcatgtagcagttcccctcgaatcctctgcacttttatgtttctgtgcccaccatgaggtccctggattacaaaactttaatttaaaagaggaaacattcttatatgtcccaaaaacaaaagtaagtattagaggcacaaaagtgcacaggcggccaggtgaggctgtagacactgccaccccgcaatgccagtctcacaactagcactggagagtagtgggcattcagtggagcttcctacctatcctgtggtccgagctaagtccagcaaggccattggtgccttccagagcacagtagtccatcaggaatctcccatgtgtcccagcagcagccttgcctcagtatctccactgtgcacagccattgtctgggagggagctcccaggatgagtgtctttggcacacaccaggtggcgggtgttagagtgcagtacagcagctggctgcctggtctattgggctccctgatgttggagggatttgaggtgcattctcaggcccagcaccctctttgtgaatttttatataaaaaccctgattttacttcattttctcagatgacatagataactaaaaacagaatctgcaaagaaattgtaattttcaactttaccccaaattcattgtttcttaattctgtgcaagatccaaacatatttttggcttccacatgagaaattgttctgtttaaactgaaatcatttcttctcatattctttcttttgggccaagtacagagatcttgttgaaaataagttgggttctttccacacactaaccctcacctcccctagagaaagagcagagattgtcctcactctgagtctaggggaggagctgttcctgtacaattcagagcctgcagagaccccccccccccgccaggtgcagcttcagtgagtcagacatttctccatgtgggcgacctccagtgcctgtgactgcttctcaggcctaattgtgggttaagaattaggacactctttaagttatcacatctgaatcctattctgaaaatcaccataaagagagatagttcaatggctattctcctgacataagtttctctttattacttggttccaagtatggagaaacatgtgacccaatatttgtctgaatccaacatcagaatcccctgcatttctctgggaaactcccggatcgaacacaggtgagctctttattctcacagaaatgtatgtagttgggaatttcaacaaattgtccagaacctgtgcctgccaacaactgtgtttctcggtgcactcttggcctggtgaagcccccaaagaccctctccctcatgtgtgtcatctctgcattctccatcacaaccagtgcttcctcctggatctgcatccatcaccccctctctgggagggaatggagtggattgggtccatagatgatgaagggagcacacattactcccctttcctcaagagtccagtcaccatccccagatccatgtccaaaaacagttcttcctacagctgagctacatgagcaacaatcacatagccatatatttttcagcaatagacacagtgagggaatacacagtgtgaactcacaccaaaacctccctgtggggatgcataggacagaaggggttgctcaggtccccagggggctctcaggacaccaagggtcactcaagaccattgtagaggcacgcaggtagccgggggctctcaggaaccatgggggaaaatcaggacaccaaagggtgcttggtacagcagggggctcaggacaattgtggggattcagaaagaacagcttcaaggctcagcttcagggcaggtgcagctggtgtgaaaaggggctggatgaggcgttttgtgtcaccatcatgaaacaccaccagacaccctccactacatctgttctaatgcatgtgtttgtatgattaggaaatgatattgatataaatatataaccatagctaggtgtgtctttttctgccttccgtcctcccttcttctctctctctcacacagaaatttacatacacccaccccacaacacacataaatctataacttttattacctgatgtattcaataaacctgattaatgtgttttgcagcttcattgtttatggtgttgtagcaataaaaaccatctgtttcccagctgtgtacttctctaagctgagtagcatctttgttcataatacccagaatgaaaaacaacccaaatgtcaatcatcagcttaactggtaaacacattgtggaaaagtcattcattgacatactacccactactaccatcagctaatgttggctatgctccaaagcatggttaaattcacaagtacttcagatgagtaaaatgagccaaagtgataaaagtgcatacataggatacaactttcataggttctatagaaccaaaagtaatctaaagttgccaaaaaaaaatcagtagttcactgtgaatattgtaggagaagggatggtctaggaaggaggaattatggaacaagataaaatgttgagggaattgacttgttatctatgttgatagtgataatgtctatgacaatatttgcccaattgtacacttcatgtggagattattgtttttagtttagccccattaaagatagtattaattagaacaggtataaattggtatcacaggaattaaagataaataaaatacatgtaaagtcagagaatcctgaatatacacatgaatgagcactggacatctctgtatttttagagaagcactagaatacagcaaaataatggcacaattttacatcactaagaaagtttatcaaacccaccaggcatgttgtattagttcattttcacactggtataaaaaactacttgagactgggtagtttacaaggaaaagaggtatagttggctcacagttctgcatggctggggaggccacaggaaacttacaatcatggtggaaggtgaagaggaagcaaggcacgtctcacagcccagcaggagagagatagaggaggggaagtgacacatacttttaaatcatcagcggttgttagaactcactcactatcatgagaacaacatggggaaactgcccccatgatccaatcacctctcacctggtccctcccttgacatgtggggattagaatttgagatgatatttaggtggggcagaaaaccaatctatatcacatgtccagttctgtcctggagttgtttcagggatccagtgtgtcctgttgatagaaacagtgacaccaagttcatattatcagttgtagttgacaccatgcaaagccaagagatctcaagtgagatttagtgtgtatgttgtgtctaatgaagtcacacactcagagcaagtgaatagggaaaagttcattatctacactgtagaggtgtctgctgagtgcagggcaggtctcccaggaaaatctaaaatggcttgaaagaaaaccaaaggagactggctcagggtttttataatggtttagtggtgggggcaaagtgaagcttcccactcacagatgggggtttatagggtttgaaactcccactggcatcaaatgaagaagctcctgtgagtctgaactagattcatcttgtgtggcaaaaaaggagacgatggaggagtgagccttaagtaatcagcagtcatgcaccaaaagatagagtgacaacttattccatgcagcaggaataaaaataatgaataagaaagaagacaagggttcagtatgggtggacaacacccagatctgcagaaatgagatgactttagaaatgtaagcaaagaataatgagaaaaagaagaagtggatggaaaattaaacaggggcctggtctaatgtcttgggtagaagcttttcacaatcaaggactatcagcttattctgcaggtcttaggtcagccatctgcttaaaaacatcagaaacgccagagggtctatgaggatgctcagtttaacatctcctatttgagtagctttacagttgtgtggaattcttaattgattcttttttgtttgtttttagggacaggctctcacactgttccacagcttaaagtacagttgtgtgatcatagctcaccttaaatttgagctcctgactcacacaacctttccatcttagctttctgagtatctacaactagatgggcacaccacccctaccctccttattttttaaacattttttcatagaaatagcatctctttatgttgctcaggttggcttcgattgcctggtctcataggatttccctcactttgcttctggaagtggtgtgattatagggaagatccactgcatctgacctgaatttattctttagttgtaaaatatgaagccaataattaactgcctgaatgttttctgcagtgagttagttaaaagcatctgataaggttccttcctatgtgattcacgagcagtattttccgctgatgttccttccagtttccttgctgaagatcacagggaattgtggaaaatatgtagcaaaaaggcagccttaaactcttcattgttagagtggatatcacacaggaatcactttcagtattttgtaacacatgcatgcaatagagcaaacatgatctctgggggtaaagtctataaacgtatgggccttttagctaccaagtcatagggtaataactgatgtaccctgaggactggaccatgattccatagtgctagtggaagaacccttgaccaagggagttttacattttattaaaatatgtagagatgccactttttaaacattcccagaaggttgtgagtgggattgactctgtctcgtatgaacaaagacaatgccctccatgattagataatattataaactagattgagctacagtgtttgctgtattgaatcactgtatattttattttttagctccatgttagttttgtgtctgcgtgttagcgttggctttaaaatgatattaatcagctctgtagtaagtagaaattcatctgagagtttctttccttgttttccagtttgataggatttccagaatacataagaaccctctctgtttgtaaaaatattccaggccaggccagtggctcatgcctgtaaacccagcactttgggaggccgaggtgggggggatcatttcaggtcaggagtttgagaccagcctggccaacatggtgaaacctcctttctactaaaaatacaaaaattagccgggcatggtggtgcttgaggattgcttgaaccctggaggctgatgttgcagtgagccgaaattgtgccactgcactccagcctgagagacacagcgagagtccatctcaaaataaaagaaaacaaaacattccaaagttatgcacaatctagaaacatatgtacttaattctcatttttaatttattaaaaagctctaataagttcaatgttttctgccttctcagttgatttcacaacacatataataatatatcctaaataaaagtttgttctcttaatacaaattactagttaataacccttactttattattgaggtattatccatcagtgttcatcaatgctctcaatgggactcttacatagagaatatacaaaatattttcctgatcatgacataaaacagatgtgaacacattcttagtattcagccatgtctcctatcatgttataaaccacatgctaactttgactttattggaacttgttctaatttcaaactagttattttttatcttcatgcagctggattattatgtgtggttatttattccgagagtgataaagacaacattaacaattttcactgcaggcatgtctaggcaaccccctgtgcacaatgaccttggtgcattggagattctatggggactcttccctacctgcctaggagagttctctgccttctacctctatcattttcctctttgaagaaatacatctaactgtcgttagaatagagacaaagacaaatcttaactgcttccagctgacgggggatgctgtttggggaagatctctcttggaggcctgtctaagggaccccaggaaaagggagccattatcccaggcttcagttgcatgagcatttggagtttgatggtctgaaaacgagaaaaggcaaatcagattattagaagacatgtatccaaacctaacaaggtggtcaaggtggtaaggacagtttgaaagaaaattccaaggctgctgacatgcccagataactgcggctgtagttatgcctgctaaggtttgggcgcatgaggcttggcttttgtcagctccctgggatttattttcccaaacaaagaaacctccaggttaggggcaccctattcattcccatcacctggcatgatttaaaggataattgcttagaattaaaatattgatacagatttttttatattccccatcgctttttgtttcttctgggctgtagccagagatcattgattggcgctcaggaataagcagtcagtctaaaatgcaggcaaatacttaaacaactgaagagattagaatttaaagatgatcgtatgatatgttttgaaatacaatttttctctttccagttctggtttttgtcagaatcaagtaattgtaagactgagttgtttgcaaaataaactttagtcttaaacttggcctgattatttgcataaagtgcagcaagaatattaataataattctgtaggaaaagcctgcaagcaccaggagtttcacagtctaacactatgagcacgtgcatcctcacgcaactcgctgaatatttccaagccagcctgttcctatcttaaatgccatccagttgtatctgccccaggtacactaatatatgggtcctgcttctctgcagcctcctctctcctcagatttcaggttttgtttattgtttgttttctctctgatataaactcaaatatgttgaaggtttttttgtgtgtggttgttcaggtttgttgttaatgagatcagaataagataatactttactctttttatttatttatttatttattttttgagtcggagtctcgctctgtcacccagactggagtgcagtggccctatctcagctcactgcaagctccgcctcccgggttcacgccattctcctgcctcagcctccagagtagctgggactacaggcgcccgccaccatgcccggctaattttttgtagttttagtagagacggggtttcaccgtgttagccaggatggtctcgatctcctgaccttgtgatccgcccgcctcggcctcccaaagtgctgggattacaggcgtgagcctccgcgcccggcccatactttgctccgttttatattcccatgctttagtagctgcttttctctatcaaatccattaactgagagaacaaatcacatttagttacaggtgaacaattaaatagtttggcatatatttatgtactggaacataacgcagcttgaaatcaaggcatgcctcactcatataaacaacatggctaaattctcaagtaattctgtttagtgaaagaaactaaggagttaagagtaaattttatatgatacatttgtaggaattttagaagatgccattattgtaaattaacacggagaagatttgagtttgtctgacaatacgctgttgggagtaatgtggatgtgagttgaatttcagagaaataaaagaaagatttagggattaatttaattattcaaaacttgattgaagtgctgagcaaatggctgcaaacataggtcaacatttttcaaatccttcactataaatttgaattaattacttattaattacacttgaataaagcaataacgaagaaaccaataaaataacatttgactaaaatggagcaataaacagatcgatgttaacacaaggaatatgactgacttatgaaaacatgcacatgaaccatggttcactctacgtattttggtaaattacagaaagttgtcataacagatggggaatcctgcagacttcactaggcatggtccacgctgccctggagttgtctcaggggagctgcctcctccagtggttagagcacaggcccaggtaataggactaatttttttagatgtgtaattttagacacactgcacaactgctgtgttctctgtgtaaattatctcctgtaaaatgtaacattgaaacctgcattaaacatattgtataaatatgtaagaataaaataagattatgagagctaaatattaatcaaggcacaagcacataatataaaattatattttcctgaatgatacaattattccaatctgtcccaggacacttcatctgccctgagcccagcctctcctcagatgtcccaccacagagcttgctatatagtgggggacatgcgaatagggccctccctctgctgatgaaaaccagcccagctgaccctgcagctctgggagaggagcccagcactggaagtcggcggtgtttccattccgtgatcagcactgaacacagaggactcaccatggagtttgggctgagctgggttttccttgttgctattttaagaggtgattcatagataaatagagatgttgagtgggagtggacatgagtgagagaaacagtggatgtgtgtggcagtttctgaccttggtgtctttgtgtttgcaggtgtccagtgtgaggtgcagctggtggagtctggggaaggcttggtccagcctggggggtccctgagactctcctgtgcagcctctggattcaccttcagtagctctgctatgcactgggtccgccaggctccaagaaagggtttgtagtgggtctcagttattagtacaagtggtgataccgtactctacacagactctgtgaagggccgattcaccatctccagagacaatgcccagaattcactgtctctgcaaatgaacagcctgagagccgagggcacagttgtgtactactgtgtgaaagacgcagtgagaagtcagtgtgagcccagacacaaacctcctgcagggtacctgggacaatcagggaaagcctgggacactgtatactgggctgtccccaggggcaagtccaggtgatataagcctgggtttcctgtcatgatctagggttgcattgttagcaaattaccccagggaccatctctagatttccaattctgtaataacatttgatgtcgtctctgactgcacaatgtcccctcaactttgtatcttttttttttttgtaacaggaggacacatcctcaccctgcagaagcctgagtgtcactttgggggcagaaatgacctgccttgatcacattgatcactgtcctgaggaaaataccccacaggggaccccgatgactccagcaaaggctctgcctcaaaaccattgaagagtccttcctttcattagaattgaccacagcacctgggcttcagcacaagccataccacagacgtcacaaagcagcagcttgacacctgatccaggtgcattttctcacctttagaagctgagagaggggtgtattctcaaggtcaacacactctttgtgggtttttacacagaaaacctgcttttactttatttcatttgaagataaatgaacaaatgtgcatctataaatgattgtaattttcacatttattccaaatccaatatttctgaattctgcatgatgtcctggcacagggttgtgttttctacaggtatttttcatcaaaccaagaaaatgcattttccactttccgtggtttttctccatgtgcagaggccttgagtagagcacgtctgactgtgtttgttttcacgctgctgataaagagaccttgagtagatcacgtctgactgtgtttgtctgttttcacgtggctgataaagacataccagagactgggaaacttacaacagaaagagttttattggacttacagttccacgtggctggaaaggcctcacaatcatggtggaaggtgaaaggcacatctgacatggcggcagacaagagaagagagcttgtgctgggtctcccctttttaaaaccatcagatctcatgagactcattcactattaagagaacagtgcaggagagacacaacccccataactcagtcacctcccactggtccctcccacaacattgagaattatgggagctacacatcaaaatgagatttgagtgaggacacatccgacccatatcattccaccccaggttccctcccaaatctcatgtcctcacatttcaaaaccaatcatgccttcccaacagctccccaaaggctaaactcatttcatcattaactcagaagtccacagtacaacatttcatctgaggcaaggcaagtcccttccccttatgagcctgtaaattcagaagcaagttacaagcattgggtaaacacacccattacaaatgacagaaattgcccataacaaaaaggccccatgcaagtccaaaatccagcagggcagtcaaatcatagagctccacaatgatcacctgtaactccccttctcacatccgggacatgttgatgcaataggtgagttccgatggtcttgggcagctccacccctgtggctttgcagggtacagcctccctcctggctgctttcacaggctggtgttcagtgtctgtggattttccaggcacaaagtgcaaactgtcagtggatctaccattccagggtctggaggatagcagccctcttctcacagctccactaggcagtgccccagtaaggactctgtgtgggagctctggccctatatttcctttcctccttgccctagcagaggttctccatgaatgatccaccactgcagccaacttatgactggacatccaggtgttttcatacatctcctgaaatctaggcagaggttctcaaacaccaattcttagcactctgtcgataatggttcattttggtggcctgttcattactggtattttccaaaggaatctcacttgaatctttactcttttgcattttgtctccatgacaatgttgggaagttttacctccaccatcataacatgatctagtgatctcacacatttgtggcaaacaatacctacaaattcagaagctctttgcttttctttccatgaaatataattctttctgttctgtgtataagcatatcttagcaactctgtgcacacccacatagatgtccacaagcctatgaattattctctgtaaataaaaatttatatcaatttccctcaatgttcataattctcctgagggtgaggaagctccttctcgatctgttcaaacaaaatgcccagaaaccatctggtaggtaaggagttcacctggctctggtgtggggtctgtctctttccctctgttgtcacacaggtcagcccagttgttcaggtcctaagaagaaagcccaggtttgtcctgattttaaaacacatcaaacttctgatgactctcctgttacccacatccatggaggatagattatttattatataattcaccaaactaatgtcaaatgcccaagttgcaataccacacatcctagggtatgttcatgcaattcactggaggagaaagtctttcagagacagatggatctgaaatgataaatatgtgggtaaggactctgggcttgagtatcattgtccagccatgtttcacaagtgtgtcctgtcaggggaaggacaagagttccttgtgttctcagagggaaggggtcacagagttcctctctggttcccaggaaagataatcgcactaatcttcatgatcttcatgagactatcctccagtgctgacctgttatagagtttttgtctgaagttctcactgcaatccccaatctacatattttcaatcagaagtgtttagagggcaggacatatcttcacggacacacattgagaaggatgtagatatgtcccactaccttctcctgagatctcagacagaatcccagatttcaaaaggacacagaaggacagctctcaggtgcttttaaaaaatgacccacttccagggacagggagcttccctataaccatggtggatgttctgaactacaataaacattggatggatccaggattgtttgaagtcactgtcattattacattcagctgctgtttcaatgtgtctgaagtagtaaatgacaatttagatgacaatttatatgaatcttcaagggtagaacaatattgaccatattccaaaatctgtccttgatccatgatcacactcatctcccagaccaggtccttcagcacgtctctttacctgaaagaagaggactctgggcttggagaggggagaccccaagaagacaactgagttctcaaagggcacaggcagcatcctactcccagggcgagcccaaaagactgggggctccctcctcctttttcacctctccgtacaaaggcaccacccacatgcaaatccttacttaagcacccacaggaaaccaccacacatttccttaaattcaggttccagctcacatgggaaatactttctgagagtcctggacctcctgtgcaagaacatgaaacacctgtggttcttcctcctcctggtggcagctcccagatgtgagtgtctcagggatccagacatgggggtatgggaggtgcctctgatcccagggctcactgtgggtctctctgttcacaggggtcctgtcccaggtgcagctgcaggagtcgggcccaggactggtgaagccttcggagaccctgtccctcacctgcactgtctctggtggctccgtcagcagtggtggttactactggagctggatccggcagcccccagggaagggactggagtggattgggtatatctattacagtgggagcaccaactacaacccctccctcaagagtcgagtcaccatatcagtagacacgtccaagaaccagttctccctgaagctgagctctgtgaccgctgcggacacggccgtgtattactgtgcgagagacacagtgaggggaggtgagtgtgagcccagacacaaacctccctgcatggacgcggaggggaccggcgcaggtgctgctcaggaccagcaggtggcgcgcggggcccccagagcatgaggccgggtcaggagcaggtgcagggagggcggggcttcctcatctgctcagtggtctccgtcctcgccagcacctcgctgtcaccagggctcctctttctttattatctgtggttctgcttcctcacattcttgtgccaggaaagaaacgaggaagacaaattttcgtctatagttgaagcttcaccaattactaggaacttgcctacaagttcctgcatgacccattataacttatcgattaaaaaatatatattctaatgcttctcaccatctcttgatttgtatcatcaactgaattgtaccctctttgaaattcatatgatgaaaccttaaattcaatggatctatattggaattttaatgaaataattaaggttaaatgtggtcataattgtaagaccctaatgcaatagacgtgttgtctttataagaagaggaagagacaccagagacctctcacttttcacgtgcaggcagagaagaggccatgtggagacatagtgcactagaaggtggcccagtgcaagccaggaagaagccgcgccaagaaccagccctgccagcacactaatcttcaacattcagactgcagaattttaagaaaatcagtatttgttgtttaagccacccactcctgttgtcttcttatgaagatccagacagactaataccacataactctgttagtgctgtcccctggatggagaattagcctcctgaggctgggcacatctctcagatttccacataaaacaggtaaaaaatagtagttctgatataaaaacttgtcatgtccctgttggccaatttctgggcaaggtcttttaaataagccaagtttgcggggaaatggagaccatatgtttgtgggactctaaccgtggaatctactgcattgctctagcagaatcaaaaattgaacaccagtgagctctttattctcattaaaatgtgtgtctttggaaatgttaacattctgtccagaatctgtgctcacaaacaactgtgtttcttagtgcactcttggcctggtggagccctcgcagaccctctccctcacctgtgctgtctctggattttccatcacaaccagtgtttcctgctggagctggatccacgagtccacatgggaaggactggagtggaccaggcgcacacgtcatgaagggagcaaaaattcccacccactccttatgaatccagtcaccatctccaaattcgggtccaaaaaacacttgtttttacagtggagctatgtgagcaacaagctcacagccatgttttaaagaagagacagagtgaggggaccacggtgcgagctcacacccaaaccttcctggaggggtgcacaggacagcaggagtcccgatgatggaagggggtggtctggattccaggtcactctcaagatcattgtagaggcactcagctcacccgggggctctcaggagccatcgaggtaaatcaggacaccagaagagactcggtacagcagggggctctggaccattgtggggattcagaaacagcaggttctaggctcagccttagggcaggttgagatggggtgaaaaggggctggatgagggtgtttgtgtcaccataatatttcaccactagacacccgccactacatgtgttctactgcatatgagtgtatgattagaaaatcatacttctataaatatataaccatacgaaggtgtgtcaagttttcctcttcaacttctatcggccttgttcgtaaggactaattccctgtaattacttgaggacctcataaattgtggtcaggtttgtaggtttcctctctttccttgtctccctttccccttattctctctcacacaaatggacataatccccactccacacgcaaagaaatctataactttcattacctgatgtattgaataaaattgattaatgtgcagctttcccatctttgttgttgttcatgctgctgtaagtataagaaccatgagattctcagctgtgtacttctccaagctgagtggcagctttgcttatcatactgagatggccaacaatccaaatgtcaatcatcagcttaactggtaaacaaattgtggaaaagtcattcattggcatactactgactgtgaccacaatatactaatgttggatacgctcaacagtatggttaaattctcatatggtgagtaaaatgagccaaacaaataaaagtacacacatatgataccacttttatacattctcccatccaagtactaaccaggcccgaccctgcttagcttccgagatcagacgagatcgggcgcgttcagggtggtatggccgtagacacacttttatacattctatagaataaaaactaaagttacataaagaatcagtagttcactgtgaatattatagaagggaaagtgtagacaggaggaattacagaaaagagaaaattttaagcataattgacttgttatctatattgataataatgatgtctatgataatatttgtacaattgaacacttcatgtgaagatctttttttttagtttaacatcattaaagatagtactaactgtaacgtgtgtaatttggtagaaacggagtcagacagagataaaatacataaaaagtcagagacacctgaatattcacatgagtgagcctgcacttctctatgtttttatgaaaacactacaatacagcaaaataatgacatcattttatgacgtgaagggggtttattaaaccactccaggcacgttgtattagtttgttttcccactgctacaaagaactacctgagtttgggtaacttataaagaaaataggttattgactcatagttctacatggctggaaaggcctcaggaaacttgcaatcaaggcagagtgtgaaggggaagcaagagacatctcacatggcagcaggagaggtggggagaaccaccacacactttaaattatcagatctcctgagacctcaatctgagacctcaatcatgaaaacagcatggaggaaccaccccatgagcccatcccctctcaccaggtccctccctggacgtgtggcaattccaattcgagatcagatttgggtggggacacagaaccaaaccatatcacatgtccagttctgtcccagagttggttcaggaatcagatgtgtcctgttaacaggagctgtgacaccaagctcccagcaccacttgtagttgacgtcatgcaaaggccaagatatctcaactaagatttagtgtggatgtgatgttggatggtgacacaccctcagaccaagtggatatggaagggataattatctctattctagacgtgtctgctgagagcagggcagttctctcaggaaagtgcaaaatggcttgatagaacagggaaagagagggcctcagggtttggtggtgggggcagattgagtctttccactcacagaaaggggtttatagggtgggaaactcccactggcttcaaataaggaagctcctgtgattctggaccgatattcaccttgtgtgtaaaaaaggaggtaatggaggaatgagccttaagctatcagcagtcacacaccaaaatacagtgtgacaagttattctatgtagcaactataaaaataatgaataaaaaacgagataagggttcaatatgatgggcaacactcaggtctacagaaaatgagatgagtgtttataagtcaaagcaaataataatgagaagcaggaggagggtgtgcagaattagacaggggtccaggtccagtgacttgggtggaaaccttttgctattaaggattatcagcttagtctgaaggtcttaggtcagctatctgtttaaagacatcagaaacaccagagaatctttgaggatgctcagattaacatctcctattttagtagccttgcagttgtgtgaaaaccttttttatcttatttcattttattatttatttatttatctgttgagatggaatttcgctcttgttgcccaggctggagcgaaatggcacgatcttgactcaccgcctcttccacctcccagattcaagcgattctcctgcctcagcctcccagtagctgatattacaggcatgcaccaccaggcccagctaattttgtatttttagtagagatggggtttctccacattggtcaggctggtctcaaactctcaacctccggtgacccgcccaccttggcctcccgaagtgctgggattacaggtgtgagccactgctccgggccgaaaatcttattcattcttttttgtttgtttttagagacagagtctctctctgttgcacgttgaaagtggagtggtgtgataacagctcactgtaaatttgaactcttggctcacagagtatgttcctatgtatcgtgcaggtgtgtctgtgtgtgtttacccggcttggggtcctctaatttttggatctgtagttaggtgtttcacattcttaagatatttttcttaagaaatatatcttaagatataagtatatcttaagatatcattaattcttaagatattttctctgtttctaatttctatttttgaaatttgaaatatatctacactatactttttgatgttagttcttaaatttcttcactctttttccctttgaaattcactttgtgtaatttccagtaacggagttgaagtccctggtttcatttaagagctgagcgaattctactgctgagcgtgcccaaggtatattcaactttatactgcatcacttttgataattttatgaatttccatttgattctttcttagtatttctctctgtcagtcacctatctagtcttgcactgtgtccacattttctttcagatacttttaacaaattcaattactttaaatatcctacttaataagatagttctagtattgtgtcatttacaaatatcaattctgaggatttttccattatgactttggtgttttttataacttatatgactttgatgaatgttataatttttgttgataaccagccatatttggacccttgatattgacgtattattttattttgtgcatttctgcctgtatttgaccacaccctatctgtgctgggccttgattgtggagatgtctgtgcatctcttcagagctacatttgacatttacttttgcaacggctgtagcagttgaagtgtgttcttctatgtccactggagacttcagatactctagtgataccttgttttcatgcctgcttggctttgtctattcacctcattccattctacagagaatctccttcacattcctagggtggattaaagtgttatatttaactgccaattgtgaaattggcggaaggcattagactaaaggaagaaactgacctctcgttgggccataattctagaaagccgttgtgatcctgagtctgagtgtgaccttccaagttttcccgaccctcctgcaagtgagatactggtctgtg

SEQ ID NO: 31 - DNA, 200000 bp, Human
tgttcttgcctcttcccctggggtagagtcctcctgttttccccagttgttccctcccacagctctcacaatctctgttggtgtccccatcttccagatctgctgccatgacctgcagattaaggctctgattccataagaaactgaggggagctgcttctcaatagatctttgatggggacctctgttcccatatcagttcatgaggggctgctccagtgccctaggatgctgattttcatggcttgctcctgcagggtaatatctgagtttcatagtgggaatcagagagttgggtctggatgcatttcagaagtgtgggctctcattctctcccagacagtcactttgggaaggatagattcttgtgactgtaaaggttcttcaagagaatagcacaactcttcagtatgttgtcccttagaatttctcactacaacacgcttaacacactcgacttcaagcaatgcaatgtgtatttgtgctccatcttgtaatggcctacgttgaatacgacagactgtgcctcaggtaatttcatatcttgactttattactctgtacaagaacttgcctctccctagatttcaattttttttgttttaaaccttcagttatctgaagcatttaataaaatttgcgaacttccatcttttctgtttatctgttattgctgatgttattgttttaaaaataaatatatatttctcattcatgtacatttttaagctgagcagcatatttttaagtaaaacctggaataataaaagaatccaaacatttttcagctgccccaaaaaaaccaaattatggtaaatgtgttcactggaacactactcatcacttataataaatatatttctggtacacagagcaacaaagaaaaatatctaagtgtttatgctgagtaaaatacgccagacaaataagaatatgtaccatattactccatttatgcaatttcttttaagtgaaaaagaatctaaagcaatatccagaagatcagtagttacctggaaaaagggtagaccaaaggaaggggaaaggaggaaacttacagaagaacaagagaaaatgttgaggggagttcacttgtccagcttggaaatgatgggttacatcatgttgatcaattgcacactttaaatatgtgaagtctattatctgccaattaacactcgcaaaatttattgcaagcagacaaatgaaaaattagacagagagaggatggtataaagatagaaaatatatattaaatgtcagaaatgtctgagaatttaactcctgaccctagttccgtccttatttttaggtgaatggtagcgtgcaccaaaatcacacacattctcagtacaggaagtgggttccacaaagcacacgaggtatgtccaattcttaccaagatttggttcagggagtaacagtgatgaggaatcacaggcccagataccggggctcactcatctcagacatgacctcgtggacacacacttagcccctcctccatgtgtaggttgacttccacatatgtaaatggagaaaccattgactcctacagaacataatttacagaaatatacaaaagataaaatagtgcaaatacttatcacaacaaaatttcctaataagacagtgtattttccaaataccgtaattgtcacccaactcctgtggggccgtgtcattttatctggggtctgccgtctcctcaggattcccaccccagagctctctatgtagtaggagacaagcaaatagggccctccctctgctgctgaaaatcagccaaatcctgaccctgcagctctgggagaggagcccccgccccgggattcccagctgtctccacttggtcatgaacactgaacacagaagacacaccatggagtctgggctgagctggattttccttgttgcagttttaaaaggtgatttatggagaatgagacacactgagtgtgactggacataagtgagagaaacagtggatttgtgtggcagtttctgaccagggtgtctccgtgtttgcaggtgtccagtgtgaggtgcagctggtggagtctgggggaggcttagtaaagactggaggggtctctgagactctcctgtgcagcctctggattcaccttcagtagctctgctatgcactgggtccaccaggctccaggaaagggtttggagtgggtctcagttattagtacaagtggtgataccgtactctacacagactctgtgaagggctgattcaccatctctagagacaatgcccagaattcactgtatctgcaaatgaacagcctgagagccgacgacatggctgtgtattactgtgtgaaagacgcagtgagaagtcagtgtgagcccagacacaaacctcctgcagggtacctgggacaaccagggaaagcctgggacactgtatactgggctgtccccaggggcaagtccaggtggtataaggctgggtttcctgtcatggtctagggttgccttgttagcaaattaccccagggaccatctctagatttccaattctgtaataacatttgatgtcgtctctgactgcacaatgtcccctcaactttgtatcttttttttttttgtaacaggaggacacatcctcaccctgcagaagcctgagtgtcactttgggggcagaaatgacctgccttgatcacattgatcactgtcctgaggaaaataccccacaggggaccccgatgactccagcaaaggctctgcctcaaaaccattgaagagtccttcctttcattagaattgaccacagcacctgggcttcagcacaagccataccacagacgtcacaaagcagcagcttgacacctgatccaggtgcattttctcacctttagaagctgagagaggggtgtactctcaaggtcaacacactctttgtgggtttttacacagaaaacctggttttactttatttcatttgaagataaatgaacaaatgtgcatctataaatgattgtaattttcacatttattccaattccaatatttctgaattctgcataatgtcctggcacaaggttgtgttttctataggtatttttcaacagaccaagaaaatgcattttccaatttccctgtttttcctccatgtgcagagaccttgagtagagcacgtctgactgtgtttgtctgttttcacgctgctgatgaagacataccagagacgaggaaacttacaacagaaagagttttattggacttacagttccacgtggctggaaaggcctcacaatcatggtggaaggtgaaaggcacatctgacatggcggcagacaagagaagagagcttgtgctgggtctcccctttttaaaaccatcagatctcatgagactcattcactattaagagaacagtgcaggagagacacaacacccataactcagtcacctcccactggtccctcccacaacattgagaattatgggagttacacataaaaatgagatttgagtgaggacacatccgacccatatcattccaccgcaggttccctcccaaatctcacgtcctcacatttcaaaaccaatcatgccttcccaacagctccccaaaggctaaactcatttcatcattaacacagaagtccacagtacaacatttcacctgagacaaggcaagtcctttccacttataagcctgtaaattcaaaagcaagttacaagcattgggtaaacacacccattggaaatgacagaaattgcccataacaaaaagaccccatgcaagtccaaaatccagcagggcagtcaaatcataaagctccacaatgatcacctgtaactccccttctcacatccgggacatgttgatgcaacaggtgagttcccatggtcttgggcagctccacccctgtggctttgcagggtacagcctccctcctggctgctttcacaggctggtgttcagtgtctgtggattttccaggcacaaagtgcaaactgtcagtggatctaccattccagggtctggaggatagcagccctcttctcacagctccactaggcagtgccccagtagggactctgtgtgggagctcgggccctatatttcctttcctcactgccgtagcagaggttccccatgaatgagccaccactgcagccaacttgtgactggacatccaggtgttttcatacaccttctgaaatctaggcagaggttctcaaaccccaattcttagcactctttccataatggttcatttttttggcctgttcattactggtatttttcaaaggaatctcacttgaatctttactcttttgcaatttgtctccatgacaatgttgggaagttttatctccaccatcataacatgatctagtgatctcacacatttgtggcaaacaatacctacaaattcagaagctctttgcttttctttccatgaaatataattctttctgttctgtgtataagcatatcttagcaaccctgcacacacccacatagatgtccacaagcctatgaattattctctgtaaataaaaacttatatcaatttccctcaatgttcataattctcctgagtgtgaggaagctccttctcgatctgttcaaacaaaatgcccagagaccatccggtaggtaaggagttcacctggctctggtgtggggtctgtctctttccctctgttgtcccacaggtcagcccagttgttcaggtcctaagaagaaagcccaggtttgtcctgattttaaaacacttcaaacttctgatgactctcctgttacccacatccatggagatagattatttattatataattcaccaaactaatgtcaaatgtccaagttgcaataccgcacatcctagggtatgttcatgcaattcaatggaggagaaagtctttcagagacagatggatctgaaatgataaatatgtgggtaaggactctggacttgagtgtcattgtccagccatgttgcacaagtgtgtcctgtcagggaaggatcagagttccttgtgctctcagagggaaggggtcacagagttcctctctggttcccaggaaaggtaatcgcactaatcttcatgatcttcatgagactatcctccagtgctgacctgttatagagtttttgtctgaagttctcactgcaatccccaatctacatattttcaatcagaagtgtttagaggccaggacacatcttcaaggtcacacattgagaaggatgtagatatgtcccactaccttctcctgagatctcagacagaatcccagatttcaaaaggacacagaaggacagctctcaggtgcttttaaaaaatgacccacttccagggacagggagcttccctataaccatggtggatgttctgaactacaataaacattggatggatccaggattgtttgaagtcactgtcattattacattcagctgctgtttcaatgtgtctgaagtagtaaatgacaatttagatgacaatttatatgaatcttcaagggtagaacaatattgaccatattccaaaatctgtccttgatccatgatcacactcatctcccagaccaggtccttcagcacgtctctttacctgaaagaagaggactctgggcttggagaggggagaccccaagaagacaactgagttctcaaagggcacagccagcatcctactcccagggcgagcccaaaagactggggcctccctcctcctttttcacctctccatacaaaggcaccacccacatgcaaatcctcacttaagcacccacaggaaaccaccacacatttccttaaattcaggttccagctcacatgggaaatactttctgagagtcctggacctcctgtgcaagaacatgaaacatctgtggttcttccttctcctggtggcagctcccagatgtgagtatctcagggatccagacatggggatatgggaggtgcctctgatcccagggctcactgtgggtctctctgttcacaggggtcctgtcccaggtgcagctgcaggagtcgggcccaggactggtgaagccttcggagaccctgtccctcacctgcactgtctctggtggctccatcagtagttactactggagctggatccggcagcccccagggaagggactggagtggattgggtatatctattacagtgggagcaccaactacaacccctccctcaagagtcgagtcaccatatcagtagacacgtccaagaaccagttctccctgaagctgagctctgtgaccgctgcggacacggccgtgtattactgtgcgagagacacagtgaggggaggtgagtgtgagcccagacaaaaacctccgtgcagggaggcggaggggaccggcgcaggtgctgctcagcgccagcagggggcgcgcggggcccacagagcaggaggcccggtcaggagcaggtgcagggagggcggggcttcctcatctgctcagtggtctccctcctcgccagcacctcagctgtccccaggggtcctctttctttattatctgtggttctgcttcctcacattcttgtgccaagaaagaaatgaggaagacaaattttcgtctgtagttgaagtttcaccaattactaggaactttcctagaagttcctgcatggcccattatagcttacagattaaatatatatcaagcttctcatctcttgatttgtgtcatcaactgaattgtgccctctttgaaattcatatgcagaaaccttaaattcaattgatgtatattggaattttaatgaaataattaaggttaaatgtggtcataagtgtaagactctaattcaacagacgtgtcgtctttataagaagaggaagagacaccagagacctctcacttttcacgtgcaggcagagaagaggccatgtggagacgtaatgcactagaaggtggcccagtgcaagccaggaagaagcctcaccaagaaccaaccctgccagaacattgatcttcaacattcagactgcagaattttaagaaaatcaatatttgttgtttaagccacccactcctgttgtcttcttatgaagatccagacagactaataccacataactctgttagcgctgtcccctggatgcagaatcagcccgctggggctgggcacatctctcagatttccacataaagtaggcaaaaaatagtagttctgatataaaaatttgtcatgtccctgttggccaatttctgggcaaggtcttttaaagaagccctgggggctttgtcacaaaagttgccttttatcatttattaggacataactgatgaacaatgagtaccagttggatggagactgaccactgaccatcttctgctgtctcctaagtatgccacagaaaaccacaccaacattactctatgtcttcaactttctaaatttgcactgattggtatttaaggcaggcccagcgttgaataactcctttagtttttgcttctctgggaaaggtcttatctatcctggccttggtcttcaagtttcagcaattctgggaagccaaggacgcctctatctcctcctccatgctctgcaactcacctgagaacagctttctcattggaatgtcttctgtttaaggaataagagtccctgtttcaggcttgggtgcctgagtacacctactggatccagcccaggattggagaaactttccagaacacatcacctgagaaatgaccagtcacactgttacactttcacaatttccgcttcctcatgagaaaattaaaattgcagagactttttcataagcgttgtgccatgtcctttcttgttttcttgcctgttcatttatgtcagaccaggtgccacatctatgtaatcaggttagaatcctgcctccagtaacacatgaaaaggacctatggttgtacttttggtctttgctccaaagtgtaaagattacaaaagtcatcaccctcattcttatgccaagagtcatctgcacaatctgatcttcaatacattttagaatccatcaaatgaatgaaattccattttttaaattaccaccccaaaaactagagagatgggcatgtccagaatagcagttgatggttgcttaactggaagagaagtttcagaagccacaagctgttgaaggcacttacgtggttagcactatagacgtctgcaagacagatgtggactagggtgaaatgacagttccagagggccgcactctcctcagtcttctggaatttccctctagaaatctccagaatctaaaaaatacaatccaaatatgtttcctatgggtcataactggggaagtttaattactgaaaaatataccaggagccttctccaaaagatcctacagggaagaacttttccagaacctcatactatgtgaagggaagaaaaatctgcccattccagatccctccccacttcctccattattatacaaatgagtaaggttagccaatagggtaagatgtaagcaaatagtccagggaaactgaagccacaaaaaggagtaaagatgaaaattcagcttttcccctggagatgcctggtcaaggtcacagcccagaaaaggaatctgattgagtctctaggtttccatggtcagaacaagcagtgctgacccgcactgcacaatcctttctaaccaggatgatggctctggattaaatatgagagtgtgccaatgcacagtctctgaggagaacatagggacactaaaaaagcaatggcagggagttagacaaggacagtagagcaatatgaagcctctgacgtgaacatttttaaaaacaagatcttggaaactccctcattcacctcagcttcttttatcatgaagactttccaagattcttaactgagacaaagaaaataacaacctgcatgcacttccgaagtctccgcttgtatcctgtttgctttagatctctaggagaaaaatgtcagacacctgggcctagtgtcaatgtgggaggcactttctacagatgaggcgcaagaaggaagggaaaacgtgtgttattggaatagtggatatgaagtgtgctctcatctgaaagcatctgcacctgctggaaatctcagatgcaacattcaactgcaagaaccaaggcacacccaaatctcctgtaagattttggattcattatccactgattcagtgcaactggagcttcagagaaggggctccctcctgtgtcatagcatccttgctttgagttcattagatttagtaaggctaatcaattgtttgaagagatggtgtcagcagcgtatgctgtcactgaaggagtattctaaaccaggacaaagccatttcatgttaggcgagggaagctggcggaaaatgctttatgagccccacaggaacttccttgcaaggcaagggctgggctggagggggcgcgcaggaaccgcccagcacaggttccatccccggaggggtgcacaggaggctggggacgaggttccctctcagcgcctgtgtcttcctttggcaacaaaaaaaatcctaagtgttcaagaagttgctgatgtgtctttaagtatcctgttccgtcagagcctttcctataactgaaggcaaccagaactgtgttttaaagtcggttccgaggactgcaagtatcttaatagtgaggatataaaggataggaatggttttactaattgaaaggatacagaattgtggggttccgaggactgcaagtatcttaatagtgaggatataaaggataggaatggtttcactaattgaaaggatacagaattgtgggagtcactatgttcctatgaataaaaaattcagatttcagtgttaagtaatgttgcctacattgtgtgagtgacagggcagtggtggatctgagagtgtggcaggtgcacagacctagtgagtcagaaatcaatatggaaagatgaggatctatggatatgaactgaaagtaagtaaacagttcatgaaattctattaaatggagtaggaaataaaacccaaacttatccaaaacacaaattccttggcgattattttgggagcagtgagttcatcaggaaccccaaacttctcttacgtcttctgattcctgttgtccatgagatgagaaattcagctctaattgtgcatcacagggcaaatctgtaaaccaggagtgtttctattgaggatcatggtggatcaggattccaggcaggtgctggagacactgtctcaggagcgcccagatgatctcagggggacctgctggacactcacgtggaacatcagcagtcactttctcagagtaaccagtgagctgtgctggtgcctgatgggactaggatggggtcaaggcaccttctcagtgtcatggagagtgattgttccagaaatcatccaggtggtctctacgctaatcaaatatgggttcacagggaggaacatgtgctctgggtgcttggtcttcagtgaaaggacgtctggccaccaaaagtttgtaaatggagcagggcatgcatttcctcaaggaggattagggcttggagcatcagcatcccactcttgtaaggctgatgtgtcatttaccttccctttcttatcccaaatcagggtcttcagctatgaaatgctctgactcatgaatatgcaaataacctgagatgcactgaggtaaatatggatatttgtcagccctgagagcatcatccagaaaccacatccctccgctagagaagcccctgacggcacagttcctcactatggactggatttggagggtcctcttcttggtgggagcagcgacaggcaaggagatgccaagtcccagtgatgaggaggggattgagtccagtcaaggtggctttcatccactcctgtgttctctccacaggtgcccactcccaaatgcagctggtgcagtctgggcctgaggtgaagaagcctgggacctcagtgaaggtctcctgcaaggcttctggattcacctttactagctctgctatgcagtgggtgcgacaggctcgtggacaacgccttgagtggataggatggatcgtcgttggcagtggtaacacaaactacgcacagaagttccaggaaagagtcaccattaccagggacatgtccacaagcacagcctacatggagctgagcagcctgagatccgaggacacggccgtgtattactgtgcggcagacacagtgtgaaaacccacatcctgagagtgtcagaaacgccaggaaggaggcagctgtactggcatggaggggatgacaaaggttattagattgaagattttcttagaaaacgacttcaagtcattaaagaagaggaacaacataaatgtgtatttgtgaaattttaattgagagatttttcatacaacatttattctgtaagctatttcagggattggaatatgaatcaaattaataaagctgatatagacatcctctgaaggcatcttcgtaaacatcaatttctgaatcagtgttgtaaatattttggaacacagacacaagatcacatttttactctacttttatctctatttttaaaaaatgccaaaaagaatcttattttgtgcatgccccattttgaattcccaccgtcaatgcatgatagttcttggttttcctcattcaagttgtcatttgtcattaagagtgttgtgtgttttaaccattctaataggtgagtaacggtatctaatttttatttaaatgcacatgtccctaaaaaattcatatttaacaatttttatataatttttggtgagatgcctctcgtgatatttggttcattttttaaatgcattttttatcagttgtaagtatgcttgcatattgattataaaagtcatttaacaaattaaaataattcatttaacaaatatgcatcttggaatttttttctccaagtctgcagttgtcttttactcccttatccctgtgtattgcagaaaaatgtttgtgtgtgtgtgtgcctgtgtatgtacaaatttagattttaaaaatgtacatttttattcatttaaagatcatgtctttggcagtatatctgaaatctcattgtaaaagacacaatagtcattattttttccatgtctctaatcttaggacacaatcaactcatgagtgtttaaccttccctacctgattggaggactatccacctgagacatttggaatacttctgtaaggagatgtgtccttcccattatttctttatttagtcatctattgatgttcctattggtttatggatgtctatttcatactccgaagaagatccttgttacattacttgttttattgttcaaaacaccacagctttattaggtgctgggagctcatttagtttggatcctgcatccttacagcacacctcatctttttgtttttagacatttccctgtttccaagtattacaataaattctaagcttgttctctacgttaccttttttgtacatagaatcagccatttttctaaagactgctcgtttttcatgttaaagaacagtattgaaatttaaaaatgtgatcctgggtatgtgtgttgttaatgtggtatcagtacttcttctaggatatctccaccaattggcctagtaaatgggcatgtttataggaacccaagtttatggacacatcgaaactatttatgtatctaatcctctgtaatgtgattacattaaaaatgagaacacactggtgtctccatccaactatgctaccatatggatgtttccagccttccttccctcactgtccataaccacccactgcaaagtgaggaaccccatcccaccatatgccattttattacttagctgcacaatttcaggacacatgcatagcagtatcagaaatgtaaagctcgttggaaacatgtttatctactagaacagactgcttatgtgcagtttctttacactgtaaacttatagaatttcttcattttcaaagttgcttaggtcagcaacttcattttccactctcctcagtgaagtcatttcaatgacaatgtataatgtcatttatttgaaattctttcaaagccaaaactatagtccggtaaacatatagaggatattcaaggaatttagagagtgggtataaaataagtaaaaatggcactgtttaagaagagtaaaattgtttttagtgatatacaatggttgagacacaacacaattaatttggctaagctcatacttttgtgacagaaaatataaacctaaatatatacaatttttgtaaaaaaactttagcagttcattaaccccagggttaaacaagactgtgtaaaattatctaataacttatttgatgagggtggggatatcatgagacatatgcaacaaagaatgaaggcattttcctcatttgcatgtaagatgttaccattcactaaagacctttaataaaaaaaaatttctacgtgatccagtatttttttccttctgtcaagcaaataactcataggattcttttctttccttggttgagaaagattttcctacaagcttcagcacacgtcaggcatacactgtccctgaatgggcatttaccctcagatgggtacacacacctgtcaacatgggggctcttctgtcagacaaacacacctttactcatgtggattcttccctcagacaaacacacatgtccccacgtggactctttcctcagattacaacatttgtccttacatttactatttcctcagaaaacagacattgcatcatgtggtctcttgtctcagacaagcaaacatgtcttcagtcagataagtctgtggatttccacattgactgtttccttacacaagcacctatatccaatatttaactgttttgtgagaaatttatcccttttctctggaaatgtatttttatgttcttactggacatattttttaataatgtttggtactatgaagatacccgaacactgtccatacgagagaataagaaagagtaataagcagattaaccctgtgcatccagacccaggagtcctttgatcctgcccttccgaaatggagacacagaggaaggatgagcaatgctgagcagtgcacccatgaccacaaaaggaaagacatggcaatgtgtcccctcccctcctcatgaaaggcagctcatcccctgttccttcaggccctggtgaggagccaccccatgtatattcccttgatcagtgtccacaccatggggtctgcactgatctgggcttcccttctcatcaccctcaatattagtgtcccttgtgaatcaggtccagctgcggctgttccacatggggccgttcttccatttcctcagtgtttgcagaagtcctgtgtgaagtttattgatggagtcagaggcagaaaattgtacagcccagtggttcactgagactctcctgcaaagcctctgatttcacctttactggctacagcatgagcttggtccagcaggcttcatgacagggattggtgtgggtggaaacagtgagtgatcaagtgggagttctcagagttactctccatgagtacaaataaattaacagtcccaagcgacaccttttcatgtgcagtctaccttacaatgaccaacctgaaagccaaggacaaggctgtgtattactgtgagggacacaggagagggaatatctgtgtgagcccagacacaaaaatctctgcagagagacaggagggaactgcatggtagatgctcctcataaccacaaaggggcagtcaggaccatcaggaggagctcaggacacctgggggtgctcagaaccatgaggggtgctcaggacatcgggggctctcagaaccatgaggggtgctcaggacatcagggggctctcagaaccaccagggggcgctcaggacacctgggggcgctcagaagcatcaggggtgctcaggatatcagagtgccctcagtaccacgagggggcgctcatgacaccaggggcactcagaaccaccagggggggctcagtacacgggggttctcttaggaagcagctccacatcaggagcctgagaggctgtgattgcgttttaaacctgggtgattcccgacctggtcaagaaaaagtctcccccaggatctctcaccatttcttcttggtaattccatgatttttttttacctacaaaacattaagttagaacagggatttaattcaacttttaattctgcagattttccgagtaatagtagcaatgttccctcaggacaatttttaaaattggctatttatatattttatttatgtaaaatgatactatcttgaaaatagtaaaatttttaaaatcatacctctaatcccagcactttaggaggttcgggcaggcagatcagttgcgctcaggagttttagaacagcctggcaacacatttagatcttttccatacaaaaagaaaaagaaaaagaaaatagctaggtgtggtgctacctctggtaccagctatttgaaagtctgaggtgggaggatcccttaagcctgggaggttgatgctgcagtgagctgtgattgtgccactacactccggcctggttgacagagtgagaccctttcttaaaaatacaaactgtttcaataagtagagctttgtgtctttgtgctgtaataatcagttgtatatattttctaactgtaactcagcatatgcatggtgttctgtttctttttctttcatttgctgttggtggaaattaaacacctctttaaacgctcttgttctcccctttggttcgcttcgggtgtcctgtttaacagactatttcttcatcttccctttttctttgaaagtctttttctttctcagtttccatgcaggataaagaaagtccctttactttctgtcctccaagtctggtgaacagctcccttctcttcataaccactgaagccaaccaagtttaggaggataacagctctccttagaatatgctcgtctacctggagactctctgccctcctcacccttttctagggtcctgcacacatcacactcatcccatcccctcccttccctaagtaccacagagtgggctctgcagttcctgcttccctgtgtgtgctcagccctggggctcactagtgctttgatgatgacgttcaaatccccatgtgcttagactctctaagaccaccctctaggaagatgccattgtgagtgagtcctggaaatcatgggctgtgttcagtttcatattgctggatcttctctattttaaaggaatactggcaattaagattagagtttgtattgaatattcatgccaaaaaagttttctttcaaaacttttcaaataaaacaatttttcctgcctagtttgaaaactacaatgtaaattcaacaaataatataatacaattttaaaggtgacgtttgtcttattggttattcaatttattaaaaacagaagatatttaaaataaattccattgcacatttaagtgatgtatttgacaagaatggcatttacatacatttttaccaaaacacgtatttaaatatatttgtctttttaatattggtagaggcagacatacacgtagaaaagcatcattttgtactacaatctcaaactgtaaacacaatttaaattcagttaaataattagaataatatgaaacaggccgggcgtggtggctcatgcctgtaatcccagcactttgggaggccgaggcgggcggatcacgaggtcaggagatcaagaccattctggctaaaacggtgaaaccccgtctctactaaaaatacaaaaaattagccgggcgcagtggcgggcgcctgtagtcccagctacttgggaggctgaggcaggagaatggcgtgaacccgggaggcggagcttgcagtgagccgagatcccgccactgcactccagcctgggcgacagagcgagactccgtctcaaaaaaaaaaaaaaaaaaaaaaatgaaacaaataggtgcgttgttttggtgtttagatatacattcacttttgcatgggcacatgtatgtgtctttgctgggctgttgtgtatgtatgtgtgcttgtatgaccatcaagttttcaaatacatcattaaatttcatagttacattcgtcttggccaggcacggaggctcaggcctgtaatcccagcattttgggaggcttaggcaagcagatgacttggagttaagagttcaagaccagccttgtcaacatgccaaaaccccatctctacgaaaaatacaaaaattagccaggtgttgtggcacgtgcctttagtcccagtgcgacagggaaatgctgggtcagaaatcccacacaaagtctctacttggttaccacctaatggaactgtaggaagaaagccaccatccttcagaacccagaatggtagatccactgacagcttgcacagtgtgcctggaagagccagaaacactcagtgacagcccatgagtgtagccagaagggagattgtgccctgcaaagccacaagggcagaactgtccaagaccatgggaacccaccagttgcatccggtaacctggatttgagacatggagtcaaagaagactattttggaacgttaagatttgactgcccagctggatttcagacttgcacgtggcctgcagtttggaccaatttctcccatttgcaatggctgtatttacacaatgcctgaacccccattgtacctaggaagtaacttgcttgttttttattttacaggctcatagatggaagggagttgccttgtctcagaaaagaccatgggctgtggacttttgagttggggctcaaatgagttaagacttcaggggcctgttggaaagtcatgaatggttttgaaacgtaaggacattagatttaagaggcgccagtgttggaatcatatggtttggctgtgtccctgcacaaatctcatcttgaattgtatctcccacaattcccacgtgtcgtgggagaaacccagtgggaggtgattaaatcatggagggagttcttctttgtgcgttattgtgatagtggatgactctcatgagatctgatggttttaaaaaacgggagttccctgccctctctttgtctgctgccatctccatgtaagataaaacttgctcctccttgccttccaccatgatgtggaggcctcccaagccatgtgtaactgtaagtccattaaactttttcctctataaattactcagtctcatgtatgtctttattagcagtgtgaaaacagactaatacagcaaatatcaatctcttaaaatattttgttgttctgcatgtaatatagcacagtctaatatgggaggtaaaataaatcatccatggaccttcagatataagtcatagggtaattatgcctgtgtccctgaaggagtgaactagaggttatacacactagtggcactacctttggcaaagggtgttcaggggtttctgaaagttctgataattttaattttaaaattgaatttactatgtatttcttcatcaacctttccagaagatttttggcagtaagaacagcctagtattggagtaatactgatgaattagagagttattttgtaattattctcctgagatttgcatgaatcaattgatatagaagttcgtatgtcccaagttgaaacatcagaatcaagaaggcttcatcacccttaatggctgtggtttttggcaaggcagtacttcaattcagccagaaagagagacaacaataaaactttcaaatgcaggggagtctgacctcagtctctctctcttataaaggcaaaggcaaagctgtgccacatcaagatttttcttcaagccttcagagtcaacattgggaatggaaaagccaatcactttgtccttagagaaggcgaagatctgagaggaatgcagagttgtgttcatgaaggtgatgacattgttatttcttctcctttgcccagtgactgctttcaagttgagtgtttcagatgtcagacctgacttatagggatggttgtgactgcacgtgtctgacaggggctgagactctatatctctaagtgtcctgtcctaggagcagctacaggagtcagccctagactggaagtgccctcactgaccctctgcctcacctgtgcagcctctggccagttgaagaaagttttatccctggaacatcttttgtcaaaaccactccaactagtattcatgacctatggtccacaccctcaagtacacagacatgatcatgctatgacttggtgtctagaagatccctgcacttttaattttacctctaatattagactccactttatcacatgcggacacagcagaatattttaagactttcatatgttatgctgaaaaattcaatagttcataaaagtctacttcccatcactgccagtgtttactactgagtaaggatctgccatcccctagggaggaactataatggatggtgtgccctgttagtggttatgggaatgaatccatcttgtggcaaatggcagcatcttcttgttttgcaagattaaatagttttctatggtgtataaatacaacattgtctttatccatttgtctatctactgacactcagattgtttccatatattggctaagattaatagtgtttcaataaacataggattcaactatcttaacaaggtggtaatttcatctgctttgggtatatttctaaaagcagaatttctggtcatataacatttccagttttaattcatttggtgcctttatattgctttccataattgtgaaaatatagagtggtatagccattatgaaaaacagtttcagttttgaggtatgatccataaacaaataatgtttgattatggctctccatgagaatttctaataaatatgatagaagtcaagaaagcgtctcacattaaagcaaggattaattttatcccttactccctcaaaagcaaaagattggaagcatgcatgatggaggctgttagcagggttcagaatgatatcataaaaggaaactcagttggataaaaatgttgggctttcagtcataggtatgtcgatactcaatatgaaaccgcgaagtcaaatgaggatctagaatgtgttcacttgaaccaacagcacattctcagacgcacctattgctgcatcacaagggtgatgaacttttgaaacaagtaaagtgtgagtgcacagtaagtgataaagttatcacctttacatgaagtttgttcaatatgccaaaggcttgtacagattaatcatacacaaatatacacaatgtatttttgcatacacagatgtctagaggatgattcttttagggaaaattcttcaggtcacagaaatctgtgtaagttggaggtcccatgaaaaagtatctctttataaatactggtctattgctcaattagggaaaatgatctctgttggagaaagcttccaatttgggagatttcttcattgcttcttgagttgtaagacatgaaccaaaaaattgactggagttttttggagtttcatggctggagtttcatggctgtgttgttaaaaatttcttatacggtttctttcaattatttgagatcagtttttctgatttttttctccagtagataaattttcacaagatctcaggaaaccatgtctctggtgctttagtttgaaaaactaacttcctaggtaaagaagcttctgtctaaccatgatgagctcatttcttctgcataccatgaagtttgagaccccattgtccagaatcatgaaaattttacactccagtttactgaaaatcttgactttgaatttaatattgattggcattgacaaaaatggttcattcttggatgtgtcctaagttgctcacccaacatatcagtggactgagaatcttccattagctccctctgtccatagcactgagtctattgacaatctttgcagtcctctatgaaggagagtcctgaggttcatcagattcttgtagacactcagatgaaccaaaggaattaacggaattgaggactgccagccatttccacaacactaggaataattaccatctaagtgtaaaggtctacatcattcagaataccctgcatgacaggctgatgcaaaaaaaaatccaaccctgcagaggcttcacagcaaccctcacagttccttcagggaagaaataatctccaagttcagtgagtcagtaaagctgttctgagctacagtaaacattggattgggcccagttttgtctgagttcaatgtgattgttatactcagctgctgatcctatatggactgagtatggataatttaaatgagcctggctgcgtggtttgttatatgaaaacctgaactaaatataaataaagggcatgtctggactagcatgagggtgagagattctgggagctccaccccccttactcttattgccctttcctccaggaacctccaggtcctcagggtgagaatccacacagatcccttcatggctctattgccaggagaccaaatctctgataaaatcactcagaccttcttcagacagacaacccagggaaagggcatttttacacccttatgtatgtggggaaaggtaatccatacccattagaagcccctgccagcagcctaactttatcatgaaaatgggtaaaattagccaataggggtacatttaagaaaattttcctgtgatgttccatccagaaaagagcaaaaatcagcttcacacctggagacttcctgtatcgggcacagctcagagaaagaagatcaccacagaattaaaatgcaactgtaagaacatgtaatgcttccgtgttccacacattatgtctcaccagtttagtcaatatggattaaatatgagagcgtggcaatgcacaaactctatctgaggaggaaagtcagagaaaaaatgttaaagaaaatatggcaatttgaagcctctgacaccagcaacttcagcaccaaggaaatgatttcaccctcattggcctcaaatttacttttcatggagcattttcagggttccaaagtgagaccaggtgaattcaatgtgcatgcacttctcaggtgtccacgtgtattttgtttattttatttctatttgcagaaagtaaacacatattcagccttagtgtcagtgtagggagtgctttccatgacatgaataccagaaaaaaaggaaaaacatggggccaattaatgtaaaaattagccactgtgtgtgtgtgtgtgtgtgtgtgtaggtgtgatttgaatactagagttggagtgggcttctatccacatgcacctgcacctgcaggtagtctcaggtgcaataatcaactgcctgaccctaaaggaaacaagaatctccccaaacccctgaagagtgtttgggtttaccgtgtgtccagtgattcagtgcctctagagctccaggaaggggctcccccggtgatgcctgagatcttttcttcaggtctcccctgcagagttcctctgggtttcctaagggcaattcactatttcaaaagatggtgtgagaagcacatgctgtcactaaaggagaattctgagccacggcacagccactttatactgggctagagacactggtatgaatatactctgtaagtttagacagaaagcctcgtgcatggtaggggctgggctgcagggggtgctcaggataaacgcagcacagtctcccgccccagagcaggtgcacaggaggctggggaggggttcctctcagggcctgggacttcctttgaaaatatctaaaataagtatttcacaagggctgctgttgtttgtataaatatcctattcaattgtgagcatttatcaaactggatgttgtaatgacaaccacttttacaatggggatttcaaactcccctagatatcttaatagtaagcagctggaggtcaagaagagatcctttcttttaaataagtgcaatttttggagaaacatactcattcccaaaataacgcattcacatattaaggtctagaaatggctcaagttgtccctggtgcattcgaatgtgggttcaaagtgaggtgcgtgtcctgagggagcttgttctccagtggaggaagctctgtcaacacagagttcagggatgtgtaggggtcgtatcgcctctaacaggattacggcttgaaccctcagcatgtacaattgtgtcgtccatctgtcatgtatttgctctatctcatcctggctcaggaattgggctattcaatagcatccttcgtgaatatgcaaatcactaaggttaatacagatatctctgtgccgtgagagcatcacccaacaaccacacccctccttgggagaatcccctagatcacagctcctcaccatggactggacctggagcatcctcttcttggtggcagcagcaacaggtaagggactccccagtcccagggctgagggagaaaccaggccagtcatgtgagacttcacccactgctgtctcctctccacaggtgcccactcccgagtgcagctggtgcagtctgggcctgaggtgaagcagcctggggcctcggcgaaggtctcctgcaaggtgtctggttaaactgtcatcacctatggtatgaattggatacgacagaccccaggacaggggcttgagtggatgggatggatcatcctaccctggtgaacccaatgtatgcccacagattcacacacggtttgtcttctccatggacacctctgtcagcacggcggatctgcagactagctgcctaaagactgaggatgcagccatttattactgtgtgaggtacaccgtgtggaaacccacatcccgagagttttagaaaccctgaggaaggaggcagctgtgatgagctgaggcagtggtgcagcatgtctctaaacttccattttatctaagtttgcattgagttccgctttaatattagccaggaatgtgggatagacgggtgctcctaagaggtccttaatttgcccattttgatgggttttccagaagacgtgagaagccactttgttaacaaagcatcccaaagccatgccctgctccagaaacacgtgtacccatttcctggtctttggttaactgacaagctctcatcagcgcacctgggctaatttctcatcaggtagaaaaatgtgttgtaaagcaaggctaacgttgtgatagcaattcctgctcaataaccttcagcatcgttgttgttgtgttctatcaactaattacgtgacttcaaggttctcattgggagtgtcttataaatttaagggatatatagaagttcccctaattaaaataaaacaattgtgagcacaacctcagtgttcaaccatgtctccacccttcccaccattcaccccaaagaaatgttcacctctcctggaagtcgggttcattttcaaattagttattttttattttactatatcaagattattgtatgtgactactgtagcagaaagtgaattatgggaacttgaagtaaccaacgaaagataaattcagaactaattaaacaagatgtcagaacgtgattggctctagtcttttaaaattcagcaggttatgtaaccaggctttaaatttacacatcttcctgttaccttcacggcacagtcaactcccattatgtaagaaatggcaactgcattcccaagcgtcatccaaaattgtaaaaatagactgggtgaggtgaggagttgattgtttaaattccgctctgaagaagcagcatcaactcaacaaaccaccgcttttccctcagtgactagagctatgtcgcaggccacatggacctaaatatccttgatagagataataggactacataaattgggctgatcatttttatgctgtaaaattaataggtgagtctgcactccagcctgggcaacaaaacaagtcttgcctgtaaatacaaaagaaagataaattaataggtactgactttgacatttcggataataatattttcataaaccgaatttaattatacccacattgttacctacaccttcactgaaaagttcctagttatcatgagttccatcaacactccacgtgttcaaatctggacatccaagagagtctggagaataaaatgcaatgagggcagtgaaacttgcatatattcagcacctcttaactcaggaggactcaatacaccctggaacactctgcttttctgaatggctcacaatgactccagctcactctccaacctcctcaaacatctggcttctgtttgccctaagttcacgctctgctcttagtctgtgctctgaagtctttgcaaaggtgaaaatgagctgtcagatggaacttccttctcacctcagcatggaatttactgtttcatttaatgaccactctttccataatggttgatttctttcagcctgttcattactggtgattttcaagggaatctctattgaatttttacatttttgcatttttgtctcggtgacaatgttgagaagtttttacctctagcatcataacatgatctagtgacctgacacatttgtggcaagcaatacctacaaattcagaagttctttggttactttccacaaaatataattatttctggtctgtgtatgagcatatcctagcaaccttgtactccacacaggtagatgtctacaagcctatgaattaatctctgtaaataaaaatttatctcaatttctttcaatgttcataattcttctgaggatgaggaagatctttctggatctattcagacaataggcccagagaccacctggtatgtaaggagctcacctggctcacctggttccccctgttgtctcacataaggtcaagcccacttgttcaggtcctaagaagagagctcagttttatctgattttacaacactcccaatttctgctgactctcctgttacccacatccatggagatacattatttattatacaattaaccaaagtaatgtcaaaggcccaatgtgcaatattgcacatcctagggtatgttcatgcaattgaatcgaggagaaagtctttcagagacagatggatctgaactggtaaatatgtgtgtaaggactctgggcttaagtgtcattgtccagccatgtttcacaggtgtgacctgtcagggaagaaccagagttccttgtgttctcagaggggaggggtcccagaagtcctctctggttcccaggaaaggtaattgcattaatcttggtgatgagactatcatccagtgatgatgtactatagagtttatgtttgaagttgacactctatcgcaatctacatcttttcacacagaagtgtttagaggtcaggccacatcttcaggatcccacattgagaaggacagagatatattccactaccttctcctgagatctcaggcagaaacccaaatttcaaaaggtctcagaagggcagctctcaggggctatttaaaaataacccacttcgtgggacagggagcatccttctaaccatgatggatgttctgaactacaataaacattgcatggaaccagggtctgaattcactgtgattattacactccactgctgtttcaatgtgtctgaaggggtaaatgacaatttagatgacctgggtgtgtggtttgttttacataaatcttcaaggatagaacagcattgaacctattccaaaatctgtccctgatccaagatcacactgatctcccagagcagcatcttcagcacatttccctacctggaagaagaggactatgggcttggtaaggggaggccacaggaagagaactgagttctcagagggcacagccagcttcctactcccagggcaagcccaaaagactggggcctccctcctcccttttcacctgtccatacaaagtcaccgcccacatgcaaatcctcacttaggcacctacaggaaaccagcacacatttccttaaatttgggatccagctcacatgggaaatactttctgagactcatgggcctcctgcacaagaacatgaaacacctgtggttcttcctcctgctggtggcagctcccagatgtgagtgcctcagggatccagacctgaagatatgagatgctgcctctcatcccagggctcaccgtggttctctctgttcacaggggtcctgtcccaggtgcagctgcaggagtcgggcccaggactggtgaagccttcggagaccctgtccctcatctgcgctgtctctggtgactccatcagcagtggtaactggtgaatctgggtccgccagcccccagggaaggggctggagtggattggggaaatccatcatagtgggagcacctactacaacccgtccctcaagagtcgaatcaccatgtccgtagacacgtccaagaaccagttctacctgaagctgagctctgtgaccgccgcggacacggccgtgtattactgtgcgagatacacagtgaggggaggtgagtgtgagcccagacacaaacctccctacagataggcagagggggcgggcacaggtgctgctcaggaccaacagggggcgcgcgaggccacagagcccgaggccgggtcaggagcaggtgcagggagggcggggcttcctcatcagctcagtgatctccctcctcgccagcactcagatgtccccagggctcctgtttctttattgtctgtggttctgcttcctcacatccttgtggcagacaagaaaggaggaagacaatttttctgtttactgttgaggtttcaccaattactaggaactttcctacaagttcctgcgtgactcattttaccgtatatgtgtgtgtgtataaatatatacacatacacacacacaccatatatatacaccatatatattatatagatacacaccatatatattatatatatacacaccatatatattatatatatacacaccatatatattatatatatacacacgatatatataatatatatatacacaccatatgtatattatatataaacacaccgtatatatatatggtttctcaccatctcttgatttgtgtcatcaatggaattgtgccctatttgaaattcatttacccaaaccttaaatccaatggatctataccggaattttaatgatgcaattaaggttaaatgtggtcaaagtgtgagaccctaattcaataaaccagttgtctttataagaagaggaagagacacccgagacctctcacttttcgcgtgcacacagagaagaagccgtgaggagacgtagtgcactagaaggtggccctgtgcaagccaggaagaagccgcgctaagaaccaatttttacagctccttgatcttccacattcagactgcagaattgtaagaaaatcaatatttgttgtttaacccacccactcctgttgtcttcttatgaagatccaaacagactgataccacgtaattctgttagctctggttcgtggagggaggagcagccccctgaggctggacacttctctcagatttccacgtgaagtaggtaaaaatagtagctctcatataaaaatgtgtcatgaccctgttggccatttttgagcaaggtctctgaaaccagcccttgtgtgtgtgtcacaaatgttttcttttatcttttatttggacataacacatagacaaggcgtaccagctggatggagactggtcactgcccatcttctgttgtctccttaggatgtcacagaaaaccacaccaacatcaccaacgtcactgtttttcttcaaccacctcaaaccgactatagaaatgatccctgcagtataagtctatttcttcaaactttctaaatttgcactggaatctcttcctaaatggggagctacatggggtctgagttttgttcctttcttcccagtcttccccaagtgccaaggacagaatagacttaaaataaaatttggccgtcagtggccccaaccccacatcactttctaaaacccacatcctgcatccatccttctctggacacccctcatcgggctacctacgaatggccagaagctgccatcaccttctgggctgaggccacgagttatacacacgtgtgatttcagtcacacacactctactgcaggacacacctgtgttcttgaggcactcaggcaccctgctgatctcagtcattctctaataaattacacatctcttattaataaaggtccagatggtcccatcagctgcagagcagtggagtaaagctcatgggtgggtccgtcaggtagaagtcagacaatggatgggatggctggtcacttcccttttcactgatgtccccagtgaatattaatggaataaaaccatattaactacagagggacagaaaagaagactagctcatcaaggtatttaaggaccaggaactttatttggggggaaagtgaagacacttttaaatggaaagccctaaagcacatacaacagctgacagagtggccactgtgcacatgaaggctgaggagacggatggcagcgtccgttcctccaagatgtccctgggtgtgtgatggttggactccttatgcatatgaatataagagctggactcagggagaaaaaagggccatatctcataggaaaggaagcccaaaaaagcagatgggcatccctggagagagctcattagatttggtgtgtttaagacaaaaatttcttccaaaaattgtaatgttctaagctaaatatgaacctcttcaataaactgagaattaacaggagaatagagctatgagttgagagaagaaacaaatcatgagagagcagaaagcaaatccacaaaaaactgtcatatgacagaagtcagaatggagctggggcagctacttcattattctgaagacttgttgaccatgtggagaaggggcttgaacaaatggggacgttctccaaccttctgaatcagcctccttcttatgcatgagtaaaaatcatagttctgggtgtgaccttcccaaatttcctgtctgtacctcttcccccaggggtagagtgtcttcccaccacaatggtttctcaccagtgtcctcagcttctcctccattgaacttaccctgcagattaagaatttcttctagatgtagttctttgggaattttctgttttctttagtttctgttgactccaccacaccccataggtcacaggtttgattgatttcccctggagacagtggaggtggatccaggcgttcaacagtcctcgctgttcctcccttcctgtcagcaccacaggacagcagataagggagttgactgtagatttttcgaattcttgggaaaatcctgcaaggactagtagattcacactccaataccattagcacatgcatccaaaaaaaatactcacgaaatatttccaggttagcctgttcctctctcaatgccatccagtggcacctgccctgggttcaccaacatgtgggccccactcctctctgctggcatctctctcctcacatttcagtcttctcgttagctctgtgaaagcaactcagatatgttaaaaggttttcttcttcatttattcagtttttcaggtttgttgttaatgaggtcagaataagaccatagttttctcatttttcacattcccacactgagtagccactttctatataaaagccagaaactaagggaacaaatcaaatatccatatccactacaggtgaacgttaaacaatttgacatatgattatgaactaaagtacaatgcagaattagaatcaaggcatcctcattctcataaaagcatgtctacattctcaaataactctgctgagtgaaagtagctgaagaattaagagtgcaattcataaacttctaattgtataaactgcaaaaggtccaactattctaaagtaacagagcagatttgaaatttgtgagaaacgggtgttgaaagtaattggctggtgagatgaaattacagagaagtgacagaaagatttaggggttaacttaattgtacacaacctgattaaagtttgcacacatacgttaccattttccaaattgtgcagtgtagatttgaattaattattaattgtacttaaaaaaagcagtaacaaataaacacatgaatatgtttactgaggaggaacaaaaaatagatgggtatgaacactggaaacatctcagactcttgaaagtacacaggcttgaacactggttctctccgtatacttccggtaaacggctgaatacactaaaagaaaacagagatgtcctggcaggggtggaatcctgcagacctcactaggtgtgtcccacactgccctggagttgtctcaggggagcagtctcctctagtggtcagaggcacaggctgagataatggggttaactctgtccagctgtgtgactttgaatgcattgtataaacactctgttctgtatgtaatttatcttccttaaaatgcaacattgacacttacattaaatgtattctacaaatatgtcaaaaagaagatgatgactgctaaatgattatcaaggcacaatcacataatataatgatattttcctgagtgataagatgactaccaatctcgggggcactttgtctgctctgagccctgcccctcctcaggattcccatcccagagcttgctatacagtaggagacatgcaaataggtttctccctctgctgatgaccagtcctgaccccatagctctgggagagaagcgccagccctgggattcccaggggtttccatttggtgatcaggactaaagacagaggacccaccatggagcttgggctgagctgggttttcactgttgctgttttaaaaggtgaactagagagattgagtgtgaatggatacacttgagagaaacagtggatatgtctggaactttctgaccaggacacctacaagtttgcaggtgtccagtgtgaggtacagctggtggagtctgaagaaaaccaaagacaacttgggggatccctgagactctcctgtgcagactctggattaaccttcagtagctactgaatgagctcagattcccaggctccagggaaggggctggagtgagtagtagatatatagtaggatagaagtcagctatgttatgcacaatctgtgaagagcagattcaccatctccaaagaaaatgccaagaactcactctgtttgcaaatgaacagtctgagagcagagggcacggccgtgtattactgtatgtgagtcaccaggtaagaagacatcagtgtgaacacagacacagaatttcctgaaataagggaggagtctgggctaaaagggcactcaggacccacagaaaacaggggaagctctagggcaggtgcagatggtcatcatgggctgctttccttgagggtctgaggcttcctctgcatctaacagtttccctgggagcctctggacatttatgcttctgtggccacccctgaggtctctggacattctcatttgttgcaaaggcagatgtaagtattggaggcataaaaatgcacaggaggccagggagtctgtagacattgttaccccagaaggtcaatctcaccactagtgctggaggagggtgggagtttgatgaagctgccctaagtatcctgtggtctaagctaagtccaacgaggccatttgtgcctccctgagcacagttatccatcagagatgtcccatgtgtcccagcagcagccatgtctcagtgtcttcactgtgcacagccagtgtctgggaggagctcccaggatgggtgtctttggcacacaccaggtggcgggtgttagagtgcggtgcagcagctggctgcctgttctattgggctccctgatgctggagagatgggaggtgcattctcaggtccagcaccctgtttgtgaatttttatataaaaaccatgattttacttcattttctcagatgacatagataattaggaacagaacctgcaaagaaattgtaattttcaactttaccccaaatttattgtttcttaattctgtgtaagatccagacatattattgccttcctcatgagaaattgttctatttaaaatgaaattagttttttctcacattctttgtttctgttcaagtacagagatcttgattaaagtaagttgggttctttccacacactaaccctcacctcccccagagaaagagcagagattttcctcactctgagtctaagggaggagctgttcctgcacgattcagagcctgcagagaccccccccgccaggtgcagcttcagtgagtcaggtatttctccttgtgggtgacctccaccgccagtgattgctgctcaggtctaattgtgggttaagcattaggacacccttcaggtgatcacatctcagtcttattctgaaaatcaccatgaacagggatagttcaatgcctattctcctgacattagtttctctttattatttggttccaagtatggagaaaaatgtgacaataaatttgtcagaatctaacctcagaatccactgcattactctaggatactcacaaattgaacacaaatgagctctttattctcataaaagtatacgtatttgggaatttcaatgtgttctccagaacctgtgcatgccaacaactgtgtttctcagtgcccacttggcctggtgaagccctcacagaccctctccctcacctgtgctgtctctggattccccatcacaaccagtgcttcctgctgtagctgcattcataaaccccccaggaagggactggagtgaatccagtgcacaggtcatgagggagtgcacattccaacccactcctcaagagtccagtcaccatctccagatccatgtccaaaaagcagttcttcctacagccgagctaagtgagtcacaagcacacagccatgtatttttaacaaaagacacagtaaggtaaccacagtgggaactcacacccaaacctccctgtgggggtgcacaggacagccacagttactcaggaccccaggattcctcaggacaccaaggggcactcaaggccattgtagatgccctcaggtagccaagggttctcaggaaacatggaggaaaaccaggaccccaaaaggtgctccgtacagcaggggactcaggacaattgcggggactcagagcaggctcaaagctcagcttcagggcaggtgcagctggggttgaaaggggctggatgaggggttttgtgacaccatcatatttcaccactagacacactccactttgtctattctaacgcatgtgagtgtatgattagaaaatgatatttatataaatacataaccatagttagctgtgtcaagttgtcctcttgctaggtgtccatagctaggtgcatcagccttgtccataaggactaattccccgcaattactggagaatctcataaattgtggtcaattatgtcagattcctctctttttctgccttcctttctcccttcttctctctctctcacacagaaacttacatacacccaccccacaacacaccaaaatctataacttttattacctgatatattcaataaacctgattaatgtgcagcttttccagcttcgttatttatgctgttgtaacaataagaacaatgtgtttcctagctgtgtacttctctaagctgagtagcatctttgtttataatacctagaattaaaaacaacccaaatgtcaatcaccagcttaattggtaaacaaattgaggaaaagtcattcattgacatactatccactactaccatcaactaatgttgggtacactcaacagcatggttaaattcacaagtacttgtgatgagtaaaatgagccaaagtaacaaaagtgcatacataagatacaactttcataaattctatagaacaaaaagtaatcttaagttacataaaaatcagtagttccactgtgagtattgtaggagaggggaaggactaggaaggaggaattatagtacaagacaaaattttgagggaattgacttgttatctatgttgctcgcgatgatgtctatgacccatttgtaaaattgaacacttcatatggagattattatttttaatttaactccattaatgatagtactaattatagcaggtataatttggtatcaaaagaattagacagagataaataaaatacatgaaaagtcagagactcttgaatatacacataaatgagccctgggcatctctgtatttttagagaaatgctagaatatagaaaaataatggcataattttatgtcactaaaaaagtttatcgaactccaccagtcatgtggtattagttcattttcacactggtataaagaactacctgcgactgggtagtttacaaggaaaagagatttagttggctcaccgttcttcatggctggggaggccacaggaaacttacaatcatggtggaaggtgaaggggaaacaaggcacatctcccagggcagcaggagagagagagaggggggaagtgacacatacttttaaacaatcagtggttgttagaactcactcactaccatgagaacaacatggggaaactggacccatgatccaatcacctctcacctggtccctcccctgacatgtggggattacaatttgagatgatactttgatggggatacgaaatcaatctatatcacatgtccagctctgtcctggagttgtttcagggatccagggtgtccggctgatagaaccagtgacaccaagctcacaccctcagctgtagttgacaccacgcaaagccaagagattacaactaagatttagtttgaatgtcgtgtctgatgaagtcacacactcagagaaagtgaatatggaaaagtttattatttgcactctataggtgtctggtgagtgcagggcaggtctcccaggaaaatctgaaacagcttgaaagaagaggaaaggagactggctcagcatttttatgatggtttggtcctgggggcagagtgaggcttcccactcacagaaaggggtttgcagggtttgaaactccccctggcatcgaatgaagaagctcctgtgatttcaaactagagccaccttgtgtggcaaaaaaggagatgatggaggaatatgctttaaatcatcagcagtcacgcacccaaaaatagtgtgacaacttattctatgcagcaggaataaaaataattaataagaaagaagataagggttcagtgtgggtggacaacacgcaggtctacagaaatgagatgactttagaaatataagcaaaggataatgaaaaaaaggaggggaaggggaattaaacagggtcctggtctgatgtcttgggtagaagcttctcacaatcaaggactaccagctcattctgcaggtcttaggtcagccatctgcttaaaaacatcagaaacgccagagaatctatgaacatggtcagtttaacatttcctatttgagtagctttacagttgtgtggaattcttaactggttcttgttttttcttttagatacaggctctcaccctgtcacacagtttaaagtgcagtggtgtgatcatagctcgctgtaattttgaactcctgactcatattcttcccatcttagcctcttgaatatctagaactagaggggcatgccactcatcccctccttattttttattttattttttcatataaataaggtctctttgtgttgcccaggctggttttgattgcctggtctcatgggatttccctcacttcccttctgaaagtggtgtgattatacagatgatccagtgcatctggcctgaattgattctttaattgtaaaatacgaacccaataattaacttcctgaatgttttctgcagtgagttagttaaaaggatctgacaagattccttccaatatgattcaagagcagtattgtccactgatgttccttccagtttccttgttgaagatcacaagagtctgtggaaaagaggtagtaaaaaggccgcctcaaactcttcgtggttggagtgggtaccacacatgcaagcagtaggacaaggatgatctctggggtaaagtctataaacatataggccttttagctgccaagtcatagggtaataactgatgcagcctgaggagtggaccatggtttcatagtgctagtgggagaacccttggccaagcaagttttacattttattacattttattaaagatttgataattttaatgtaaagatgacattttttaaacattcccagaagattgtgagtggtattgattctgtctcgtatgaacaatgacagtgccctccacggttagattatgttataaactagaatgaggtagagtgtttggtgtgttaaatcactatttttttagcttctatgttagttttttgtttgtgtgttagcatttgctttaaaattctattaatcagatctctagttggtagaaattcatctgaaagtttcttccattgttgtccattttgataggatttccagaagatgtaagaaccctctctgtttgcaaaaatattccaaagttgtgcaccatctagaaacatagttacttaattctaatttttaatttattaaaaagttgtgataagtgcaaagttttctgccttctgaattgatttcataacacacagaataatatatactaaatggaagtttgtactagtaatacaaattactgattaataacctctacttttattattgaggtattatccatcaatatataatcttaaatcaatgatctcagtgggaatcttacctaagtaatatacaaaatattttcctgatctcgacacaaaatagatgtgaacacattcttcatattcagccatgtctcctgtctatcacattatgaaccacatgctaactttgatttacttgggacttgctctaaattcaaactagttatcttttatcttcacgcagctggattattatgtgtggctattttatcagagtgataagatacaatactaacaattttcactgcaggcatgtctaggcaagccccctgtgcacaatgaccttggtgggttggacattctatggggactctcccctgtctgcctaggagagttatctgcctcctccctctatcattttcctctttgaataagtgcatctaactgccgttagaatacagacaaaggccaaccttaactgcttccagctgacaggggatgctgtttcgggaagatctcccttgaggtctgtctaagggacccagtaaaagggagccattatcccaggcttcacttggatgaccatttggagttgatgcctgaaggtgagaagagacaaaccgggttattagaagacatgtatcaaaaccaaacaaggtggtaaggacagtttgaaaaaaaattccaaggctgctgacacacccagatatctggtggctgtagttatgcctgctaagatttgggtgcatggggcttggctttcgttagctcccttggacttattttcccaaacaaagaaacctccgggttagggggaccctatttattccagtcacctggcatgatttgccggataattgctcagaattaaaatattcgtccagatgtttatatagcccatgcctgtgtttcttctgagctgcagccagagatcattggttggttcacagcgataagcagagttagtctaaaatggaggcaaatacttaaaacttatttcttctctcagttaatggattctatagagaaaagtagctactcagcatgggaatgtaaaaaaatgagtaaactatgatcttattctgaactcattaacaacaaacctgaaaaaccaattgaagagactgtaatttaaagacaagtgtatgatatgttttgaaacataatttttctctctccagttctgatttttgtcagaaactaatcattataggactgagttgtttgcaaaataaactttagtcttatggttggtctgatcatttgcataaagtgaagccataataattaataataattctgtaggaaaagcctgcaagcatgaggagcttcacagtctaacactatgagcacatgcatcctccagcaactcactgaatattttcaagtcagccggttcttagcttaaataacatccagttggtatctgtcccaggaacactaatatatggttctctctgcaggcccctttctccacagattaagggttttttttttttctctgtaatatcaactcagatatgttgaatgctttttccttattagtggtttttcaggtttgttgttaatgatttcagaataagatcattgtttactcattttttttaaattcccgtgccgagtagctacttttctctatagaatccattaactgggagaaaaaataacattttcttatgggtgaacaattaaatagtttgacatatatttatgtactggtatataatgcagcttgaaatcaaggcatgcctcaatcataaaaatcatggctaaattctcaaagaattgtgctgagtgaaagaagctaaggaattaagagtaaattttatataattcattgtagaaatattagaagatgccactaccataaattaaaatgaagaagacttaaatttttctgagaaaatggtgttgggaatgatgcggatgtgatttaagtttcagaggaataagaaaaaagatttagggattaatttaattattcaaaacttgattgaagtgccgagtgaatggctccaaacatagtctacatttttcaaatcattccctataaatttgaattaattatttatttttatacttgaataaagcaataacaaagaaataaatgaatatttttgctaaaatggagcaataaaaagactgatattgacagaagaaatatgactgacttctgaaaatacacacacatgagccgtggttctctctacatatttagataaattacagaaagttgtcataactgatggggaatcctgcagacttcactaggcatagtccacactgccctggagttgtctcaggggagctgcctcctccagtggttagagcacaggcccaggtaataggactcatttttttagatgtgtaattttagacacactgcacaactgctgtgttctctgtgcaaattatctcctgtaaaatgtaacattgaaacctgccttaaatatattgtgtaaatatgtaaaaataaaatcagattgtgagagctaaatgctaatcaaggcgcaatcacgtaatatacaattatattttcctgaatgatggaattaataccaatctcccccaggacacttcatctgcacggagcccggcctctcctcagatgtcccaccccagagcttgctatatagtcggggacatccaaatagggccctccctctgctgatgaaaaccagcccagctgaccctgcagctctgggagaggagcccagcactgggattccgaggtgtttccattcggtgatcagcactgaacacagaggactcaccatggagttttggctgagctgggttttccttgttgctattttaaaaggtgattcatggagaactagagatattgagtgtgagtgaacacgagtgagagaaacagtggatatgtgtggcagtttctaaccaatgtctctgtgtttgcaggtgtccagtgtgaggtgcagctggtggagtctggaggaggcttgatccagcctggggggtccctgagactctcctgtgcagcctctgggttcaccgtcagtagcaactacatgagctgggtccgccaggctccagggaaggggctggagtgggtctcagttatttatagcggtggtagcacatactacgcagactccgtgaagggccgattcaccatctccagagacaattccaagaacacgctgtatcttcaaatgaacagcctgagagccgaggacacggccgtgtattactgtgcgagagacacagtgaggggaagtcattgtgcgcccagacacaaacctccctgcaggaacgctggggggaaatcagcggcagggggcgctcaggagccactgatcagagtcagccccggaggcaggtgcagatggaggctgatttcctgtcaggatgtgggactttgtcttcttctgacggttccccagggaacctctctaagtttagcattctgtgcctatgaacgtcttctctaagtatttgaaagagattattttaatatgaagagcagttctcactcgcccaaaatgtggattgatgcttactgggatgaaaagtccccaaacatggtcaccccgataagagtctgagtgagctcagggcttcctgctgagtctcctcctatcagaccaaggacagggacctcagtgaggttcccccgtcaagaacagtctttatggatactgattgtgggcggcaacccacccaggtgccgacgcaagagaccgaggacacgagctgttccagtacaataaaatataaaacaagaatagttataccagatatagatcttagatatgattatatatgaatatcattaatcattagttggtagcaattactctttattccaatattataataatcctcactctacaatcataacctaggaaaagccaggccatacagagataggagctgaggggacatagtgagaagtgaccagaagacaagagtgcgagccttctgttatgcctggacagggcgaccagagggctccttggtctagcagtaatgccagcatctgggaagacgcctgttgccaagcggaccatggtctagtggtagactcagtgtcaaggaaaaacacctgctacttagcagaccaggaaagggagtctccctttccccggggagtttagagaagactctgctcctccacctcctgtggagggcctgatatcagtcagacccgcccgcacttatccggaggcctaacagtctccctgtgatgctgtgcttcagtggccacactcctagtccgccttcgtgttccatcctgtacacctggctctgccttctagatagcagtagcaaatcagtgaaagtactaacagtctctgataagcagaaataatattgtaagctgtttctctccttctcctctctctctctgcctcagctgccaggcaggaaagggccccctgtccagtggacacgtgacccatgtgaccttacctatcattggagatggctcacactccttaccctgtccctttgtcttatatccaattaatatcagcgcagcctggcattcagggccactactagtctccgcatcttggtggtagtggtcccccgggcccagctgtcttttcttttatctctttgtcttgtgtctttatttctatgctctctcgtctccgcacacggggagaaacccactgaccctgtggggctggtccctacactgatcacagacaatagagggtaggccaggatcagtgtcatgtaggacatcacaggtttcacctctgaaccttttcctgacactaaatatgcaaatcagcatcagcactgatctggtgattcttttgttcctaatccatttacttcctttttcagtcgttgttttcatttttccatttgcttttcctgctttctgcaaaaggaagatttttccctgtggtcaaaattccggacctcaagccctttcctggcgctcaggtgggtctcaggctgtggctgctgcagtcacgcgggagaggctggtgggactttcttcactcctcgtcactcagggccctccactgtgttgcatggagacttatctggaaatgcaagttgcgactgagaactgaaggggacaagcttgtttggttaacatgggatgtggatgtgtttctaattttgttctgataaactttcacagagtaactttctgcactagtcatgtgaggaagaggatgtgaacgtagtcagaataaaaatagaacaacttgtgttataatctttacaggtgaagctggagaaggtcatgaatagagggttctcatgcacacatccctgataacaagaactaccataaaattactctgcacaaccacaactttcaacaaaggctaccacaacaataagagaattaatattgtgaggatatctgccctgcaactcccagtacaatcttaaactgattccacccttgttattaattcttctacccccaggataattgcctcagaacagctcatgtaagtcctctcatttatcccttaaaacaacctttaccaacctttactaacctgacttcctttacctacctaaatatgcccagggataatcccactggaatgctcattttcaaatacatattatttgattttggagaatttctttctgtctgatattcaggtgtgacaagctgtagagggtcacaccactttcctgtgagatgtaggggatgacaatttggggggatggctggaaacatccaatatcctcagggtcggccatcagtaagcgcaggctggaagtctcagaacgagttgaagttgcttaaccacggaattttaccttctccagatcagctttgatggaatcagggccaaactggttatcaatgataatctacctaacattgagtcaactgatcacagttttaataacctctattaaaaattcacaccaacacttggattagtgtctgatcaaataactacaaagtattttccagccaagtataccataaaacagaccattacccatggagaaaaacatttaacatgagttctaggtccttacattgttaaaggtgtaaaactgattatttttaaattatgctttttatttttgctattgagttgtagaagtttcatttacattttggatattaacgcttttttcagatacatgatatattatccaattctgtgagttggaattatttcattgctttgcagaatatttttttaatctagtccaacttgttcaattctgcttttttttaaatgtgctttgaatgtaaaatccagaaaaagattgctaatttttgaggattgggagttttacagttgcaggaatttcattgaaatatttaatgcatttaaagttaatttttgtgtttattctaacctaaaattcttaattcttcacatgtgaaaatccagttttcataacatgctctttggaagacaccataatttagccattgtatgttgatggttctcatgctgaaaatcagttcgccatcaaaatgtgggtttatatctaagctctctatatgcatttatgctgaaaccattcggatttattactctgtgtttgtaacaaatgttgaggactggaagtgaaatgcctcaagctttattcttgccttattacagatattagacccaaatattctaaccttctactagtgagtataataatagctgtcgctttttttttttttttttgattcagagtttcactcttgttgtgtaggctggagtgcagtggtgtgatctcagctcaccgcaacctctgcctcccgggttcaagcgattctcctgcctcggcctcccgagtagctgggattacaggcatgcaccaccacacccggctaattttgtattttcagtaaagatggggtttctccatgttggtcaggctggtcgcgaactccagacctcaggtgatcctcccgcctcagcctcccaaagtgctgggattacaagcatgagccactgcacccagcctcttcattttttttttattcatatgttcattcagcagccactatgtcttcccattgatttctttggtttcctctttactatctttttctttttagtaaagctgttactcctaagggaagatgggaggtgggcctggacagggatttggtgcattcctctcttcactcacagttcttattgatctctccagtgtctctagaacactggttttcctggcattaccgctgcagataatttctcttgcaatgtagtgctgatgaggaggtgtgtctggatgcatttcagctatagttgctgttttgctttccctgacacaaccgtcccaaggggtagaggctggagcattttgtgatgtgtccccagtactgaagaaaaagccttcaatagcaggaggaattcctcaactgtatacactctgagaatttaaacaataacttctctatcacactcaaatttaaaccatccaatgaatatgtctactttaatcgtgtgttaacttaaatgatatttggcagcctctgtcccagaaaagattatcatctgctcctgtttatttccctgcaagtctttatctctcttcagatttcagatatcttgtttgtcttataacatcaaaaatctgatgaatttaagaaaatgtgctaatttgcagatcagtaagctttagtagttgtgagaataataacaaatttttatgggatgcctgcatctccaagctgagtagcatctttatttctaacactcagaaactagaaacaatgcaaatatcaagaagatatatagataaagagtaatggcatgctaatttacggtaatcatagccatcactagaatcaatacactgttgatgctcaatgtggttgaatcacaagtagttataatgagtgagaagccacacacataaaacacatactatataattcctgtataataaattcttgaaactcaaaaccaaagtattcaatatgaaggattgactcagaatatggcaagggaaaaaaataattgggaaggaggaattgtagagtaacacaaggaaacttttaagtgtaatttatttgtttgttatctggatggtttttggggatgcacaggtgagcacgagtggaattacattttgttgtgtttgtttttttctgaagagatgtggtcctactctgtgacccaggcaggactgcagtggtgggatcatagttcaatgtagcttccaacttctggtcaccaacaatcctcctgcatctgccatctaagtagctgaaactacagttgtgtgccaccaggctcagcttgagtacttattaaatcaaacactttatgcaatatttaatgtatggcaataatgtctcattgagagtattacaaataaatgaatggataatttgttcagtacagattgatggaaaatagacactaacatgaggaatgtctgacatttatgaacatacaactgcataaaatgtgttctcttacattcattaggtaaacacaatagtgcatacacatcaaaccatgctttcattacaggaaggaagttctgaaaatgtcactgggggtgacccacgctgtgctgggcttggttcgggggcagtcaggcccggtggtgagaagcacaggcccagatacccaggcttactctgcaaatgtgagctctggggacattgtaccacccatctgtgcttctgctggtaattttccatctgtaacgtggaaataacattgatactacataccgtgatttctccacatatgtaaaaataaaataagatgattgctgctaagtttaaataagggcagttttcataggtccattgtacctcaataaaattactttaaaataaaaattacaaatacagttgtaggtttaaagagtttatcacagaacaaacttataataagaaactatattttcaaaaattgtatcaatatctctaaactcccccaggacacactcacctgctctgggctctccactctcctcaggattcccaccccagagcttgctatatagtaggagacatgcaaacagagccaaacctctgctgatgaaaagcagcccagccctgaccctgcagctctgggagaggagccccagctccaggattcccaggtctttccatttagtcttcagggctgagcacagaggactcaccatggagtctgggctgagctgggttttccttgttgctattttgaaaggtgattcatggggaatgagttgaatgtaagtgaatatgagtgagagaaacagtggatgtgtgcggcagtttctgaccagggtgtctctgtgtttgcaggtgtccagtgtgaggtgcagctggtggagtctgggtgaggcttggtacagcctggagggtccctgagactctcctgtgcagcctctggattcaccttcagtagctcctggatgcactgggtctgccaggctccggagaaggggctggagtgggtggccgacataaagtgtgacggaagtgagaaatactatgtagactctgtgaagggccgattgaccatctccagagacaatgccaagaactccctctatctgcaagtgaacagcctgagagctgaggacatgaccgtgtattactgtgtgagaggcacagtgaggggaggtcagtgtgagcccagacacaaacctcctgcaggggcatctggagccacaagggggcgctcaggatacacagaggacaggggcagccccagggcaggtgcaggtggaggtcaagggctgctctccttcagggtctgtggcttcctctcatctaacagttccgcagggagcctcttgtatttacagtgatgtgctactgaggtttctaagtttgtaaagtttattactacaggaggaaccactatcaaacgcccttaaggcaggtgtcactaatggagaaaggaaagtgcacaggaggctgggtgaggctgtggacactgtctgcctatgattcaagtttcacaagcagtgacggagaaatgggagtttgatggagctccctaactaccatgtggtctaaactaagtccaactaagtccctgagctctgggtgcccatcagggatccgccatgtgcccggcagccgcgtgcctttttgtctcctctgcgcccaatcactgtctgtgatgagcttccaggatgtgtgtgtttggcacaaaccaggtgatggacgtcagacagcagcagctggtgcccggatcatgggctccctaatgctggaggaatgagaggtgcattctcagggacaagacattgttgatggatttttatgtagaaaccacgattttacttgcttctctcaggagacatagaagaagcaaccatgcagtcagcaaataattataatttccacaattaccccaaatggttaatccttaattctgcgcagggtcccaccgtagagtcacctttctcatgaggaatggttgaatctagaatgagtccacatgattttcatatttttggcttctgtccatgttcagagagttagagtagagtaagtttggacctttccacacactaagcctcacctcccccacagaaagagcagagacttcaactattcctgagtgtggggtaggggctggtcctgcacacctcagagcctgcagagactgccacgtgcagtgttatagacttgggtgttttctcattcaggaggggtgacctccacggcctccgatttctgctaagatataactgtgagtgcagaattaggacactattaggctatcatgcctcacttctattctgaaaatcaccctctttatagtaaaagaaaacaattcaatgtccatgcccctgaaagtcatttctttttaatttggttgcgagtttaccacatagtgcctgaatttattctcagaatctactgaattgtttataaatctcacaaattgaacaaaagtgaattcttcattcttactaaaatgtgtgtatgtaggaatttcagtgtgttttccagaagccatgcacaccaaccactgtgtttcatggtcatttattggcctggtgaggccctcacagaccccctccctcacctgtgctgtctctggattctccatcacaactagtgcttcctgctggagctggatccgccagtcctcagtcaagggagtggatcagggcataggtcacgagggagcacaaattctaacccactcctcatgagctcagtcaccatctccagatccacgtccaagaaccaaattttcttttagctgagttctgtgaccaacaatgccacaaccttgtattactgtgagaggaacagaagagatgtcagtgtgatcccagacacaaacttccctggagaggggcccaggaccaccaaagagcactcaggcccatgaaaacagggcccaagctggagaacgggtttcctgtcaccctcacctttcaccattagatactctacactatgcctatgctgaggtgtgtgtttaatataattagaaaatggtatttatatacgtgtataatcatatctagtgtaagaatttgtagtttccaccttatgtgaccattaaagacaacatctctcacgttattcaaggaccttataaagtataatacttttacataagatttatctccttttgtgtgtttctccttctgtctatattctctctctctcttcctccctctttctctctctctctccatctctctctctctgtctctctctcacacacaaatacacacacatgcaatcggtgacagtatataggctaattaagaatatattcccatatgatttaaaaataacagttttacaaatatttgcctttaatttttcaaagaaaattaaatccaaatgccagtgattttttatgtgacttttaaaatttaaattgttaatttgtgttttcatcaatgcttgtatgtgtgcttgtgtattctcacagattatgtggtgccttcacagaattaaacatgtgaaactctccacttgaatttctgtgactcaggactggtgagcaaaaagttagaagtcactctcctgatccttccctacagctgcagattcctgaaggtaatgacctcacagtagaccaaggccctcaaaggtgaccttgagttccagcacatcttgggaggccaagcggatgtttgtgaaagaaatagtggctatgtgacagtttctaaccagaatatctctgtgttttcaggtatccagggtgaggcccagcttacagagtctgggggagacttggtacactgagaggggcccctgaggctctcctgtgcagcctcttggttcaccttcagtatctatgagattcactgggtttgccaggcctcagggaaggggctggaatgggttgcagttatatggcgtagtgaaagtcatcaatacaatgcagactatgttaggggcagactcaccacttccagagacaacaccaagtacatgctgtacatgcaaatgaacagcctgagaacccagaacatggcagcatttaactgtgcaggaaacatcgtgatgggaagtccacgtgggctcagagacagactgccatgcaggacacagggggtggcttggctgaagggggcactcagcacccacagaagacaggagcagcccagggcaggggcaggtggagttcaagggctgctttcctgtcaggttctgtggcttcttctgcatcaaatgcgttctcctgggagcctctctatatttatggttctctgcctaccactgaggcctctggattggaaaagattactactagaaaaaaaaattctcatatacccctgaagaatacatcattaattgaggcagaagatgtcacaggaggccagggaggctgtggaaactgtgcgacgtggatgcacatctgacaacaaagacatgaaaaatcagggaacactgataaaacctcctaattatgccatggccctctctaagcctagtaaagccattgatgccttcctgggccaaacccacccatcaggggatcactcctgtgtcccagcagcagacatgccttagaatctccactgtatgtaatcactgtctgggaggagctcccagggcatgtgtctttgcattaaccaggtgatgggtgtcagagaacagcagctggatgcctggtctatgggttccctgatgttgaagaaatgggaggtgcagtctcagagccaatacactgtttatgcatttttatatagaaaccatgatttttcttgcttctctcagatgacatagaggatcaagaaaacagtctgtaaacaattgtaatgtccccatttcttctgaataaatgcattatttcttaattctgagtgggggtttgtcagaccatgcccttctcctaagcaattgttcaatccaggctgaaaccacatggggatcacatactttggtttggttcaggtgcagaggtcttcagtagagcaaatttggtccttcccacacagtaagcctcaccttcctcagagaaagagctgagattgatccaactttgtctgaggtgggagctgcttctccacaccttggagcttgcagagacccctaaatgcagctttattgagtcaggtgtgtctccatgtgggggacttctgctgctagtgatctctgctcagttctaaatgtgggttcagaattaggacacttaggttatcacgcctcaaaaattaccatcattgtagatagaaataatagtacaatgccaattgttgtcacttgtttcttattattattggagtataagtttgaagagacaaattgttaccatatatttgcataaatctaatgtcagaatctcttgaattgctcttgaacacttacaaactggttagaagcagattcttatttttttctatactagtgtattttgggatgtcaacattttgtccagaacatgtgagtaccaataactgtgtgtttcagaaatgactgtgagattcagtcatttctatcgagtgggaaaaccagttaactttgtctttgatatatggatggaagcccaagatagaggcttgtcagtcattgtttctgtgccttctcccttgggaatgtctgtatttttttatgctctgtcctgggtctataccccaatggttcccctactccatggcacctgcctgtgcctgtgcatgcccctgcccacactctccgtgaaacatctgctttggctcaggaagaacccctcctctgccttttttcctcctgcccctggtccacattcttctccatccacaggctctcagcagcacctcccatccacactaaccctacatggggtcataccttgtccaccacttcctctctcttttcttctgagctttgccttttattccaacagcctgtttccatctcacctggacttgtgtacaggaaaggatttaccgagcagtcttgggttgtgcaaaccctgaacattcctgaaaaagtgctttctcaagctaggcccatattcagctcctgggagatgatatctgcctttttggcatactcctcctggtagtattattaaaccacttgattaagataaggtttacatctgtaaaactacacattatttaacatacttaactcattgagtttggagtaagtatacatctgcaaagttatccccatcatcaaggtcataaccatagaaatcacttccaaaacattcctcttatctctcttaatattgtgattattttattagttaaaatgtatttttgtttgtgtttgtctgtgtctctgtgtgtgtagcctgggtgcacgctatactacctgttttcataatgacttatggtgaatgcctattagtgctcaagaggccggcgtctgagcactggaggtcaattgtgcaggtgtcacacacatctgtgatgggcccaataaacagccctgggcacaagcactcaggtgagcttccctggtggacaatgcttcacacatgttgtcatgcatcactgctgggagaactggggacaagagactcctcagggaaagaacacctgggagctcatgcctggattctcagggccttctccctggtgcctttgctcattttaattcatattcattcgctataataaagctgcacccatgagaataacagcttttcttgtgtcctttatttgtactgattaaggggcctgaggatggtcttgggacactcaacacaattacatcagagttggagaatgctagaaagttcctgattgctgacgcatggctagaggattttttataacatcaaaggatgagaaagtgcgggataaaagacattcaatgcccagatggctacagaatcatatggcatgagatggcatgtacactccaataaggagcaggaagtgaaagtaatccatggaatttagaaacaacagatacagcttcctaggagttgttccctgaaaaaggaaaagtaaaaataatgaggaacaacccgaatatgcaattcatatctgtgatagctaaaataatagtaaaaagatgcacatccagccctgcagtgtgccctgtgagccgaggctgctagactcccattcaccaccaaagggtacagttgtccagaaacaacacacaacacataagagtgacacagaaggtagcccagagtttgggctggggagaggaatccactagacaactataacaaggaggacagcatggaaagtggcatcattttgtgatatgattgatatcattaatttatatcatcggattgtgaacaaagttagccaatggactatgagagtgactgacgtagcagcttctctggcttcgtgtgctgcagatgagaggagaatgtttgggaggatgctggacccacagctcacaacagacatatgacagacgtagctgatcccaacctcaagtaggatgttcttgatgagacagcttccctggtgcactggatatcagatcctgtatagtttcagaacttgtgtagtttgtgttgctttggctttttctctggatcttttaggtgctaatgaaatgagagtgcttcacaaaaaaatggggcagacaaaggggatagttaagggcctcctccaagcaatgtggatatcataaaataaatgttaaaaaatgaaagaactaaacaagaaggtgctggggttgacacaaaggacttaaaacagcactaccaggagttgggtgcagcaatgggcatcccttcaggtccatcagcaagtcagagacctaaacaaatattccctattcatgttgaattggcagagtgtaaaaatctagaagacaaaatggccaggaaaaatgtgcgattttgcatgggtgaaggtctggcaagttaatcatcttgaggactgttgaggtcctgaggtggtcctgcccttgcttgatgcccaggccgtagtccaactcacacgaaattgccagggaatagacagtagtttttttagtagttcttgttatcaggcataagtgcatttgaattttctcttcatggcctttcctggcactatttctcattttttttaacacacatagtttcaactagatttatcaccttcacagggtcacagagaagggtggaagaagggaggccctggtatgggtctcgaagaaacatggaaaagagtggagagggacaatagcagggtgtaaggaattattgagaccttactctgcccctcccaggaggctcaggccagcctttttctgcatttgaggttctgggttataaacgctgtagactcctcccttcagggcagggtgacaactatgcaaatgcaagtgggggcctccccacttaaacccagggctcccctccacagtgagtctccctcactgcccagctgggatctcagggcttcattttctgtcctccaccatcatggggtcaaccgccatcctcgccctcctcctggctgttctccaaggtcagtcctgccgagggcttgaggtcacagaggagaacgggtggaaaggagcccctgattcaaattttgtgtctcccccacaggagtctgtgccgaggtgcagctggtgcagtctggagcagaggtgaaaaagcccggggagtctctgaagatctcctgtaagggttctggatacagctttaccagctactggatcggctgggtgcgccagatgcccgggaaaggcctggagtggatggggatcatctatcctggtgactctgataccagatacagcccgtccttccaaggccaggtcaccatctcagccgacaagtccatcagcaccgcctacctgcagtggagcagcctgaaggcctcggacaccgccatgtattactgtgcgagacacacagtgagagaaaccagccccgagcccgtctaaaaccctccacaccgcaggtgcagaatgagctgctagagactcactccccaggggcctctctattcatctggggaggaaacactggctgtttgtgtcctcaggagcaagaaccagagaacaatgtgggagggttcccagcccctaaggcaactgtataggggacctgaccatgggaggtggattctctgacggggctcttgtgtgttctacaaggttgttcatggtgtatattagatggttaacatcaaaaggctgcctaacaggcacctctccaatatgacagtattttaattagtgaaaattttacacagttcatcattgcttgcttgccttcctccctcctgtccactctcactcactccttcttttattttctacttaattttacaaaatcatttaacccctttttgaactattaataggttatctttgtttggtgattgttttcctttcaataatatgtactgaataattcatctttgtgccaattcataagtattctggtgtaataaagacttctttcataaaaattggataaattaaaataaagataaatttttaaaaacatacgatctatcaaaactgaaccataaagaaataaaaactctgggttgggtgtgtttgctcattcctgtaatcccagcactttgggaggccatggccggtggatcacctgaggtcaggagttcgatatcggtctggcaaacgtggagaaacgctgtctccactaaaaatacaaaaattagctggacatggtggtgctcgcctgtagtcccagatacttgggagcctaaggccagagaagagattgaacccgggaggcagaggttgaaataagccgaaatctagccactgcattccagactgggcaacagagtgagactccatcccgaaaaaaaaaaactgaacagacctatgagtaaagagattgagtcagtgatttttcaaacatctcaaatcaaagaaaagtcaagaacttcatggcttcactactgaattttatcaaaaatttaaaaaaaaactagaatctctatacaaatttccaacaaaataaagaggaaaaaatacatgcaagcttattttggaaggtcctatttccaaagcaaggaaaagacactccaaataaataaaattacaggctaatatccctgattatctagtttcaaaaactctcaagggtggtgagaaaccaaattcaacagcacattaacaacagaattcaccatgatcaggtgtggtttatctctaggaagcaatgaagtttcaacctgcagaaataaatgtgatatatcaaatgaaaatattgaaggactaaaaccatatgcaccatatgtccatgtcaatagatgcagaaagagcctctgtcgaaatccactacactctaatttttaaaaatctgaacatattatgcataaaacatatatacctcaacataataaagaccacatatcacaagcccacatctaacatcatacacagtgatgaaaattttattttcctctaagactagaaactagacaagatgcttcactatcaccaatattattaaacacagcactgggtggtctagacaaaacaggccagaagaaaaaaatagaagtcatccatatagtaatgaataaatataaaatatatttttacatattacatgctcttatttatacaaagccttaaacactccaccaaaaaagattgaaactaatgaagaaattcaataaagttgcagaatccaaaatcaaacttacatttcaagatggcaggttagaggcattgctagtattcctcttccacttggaaggacaaactgatgtggagagatgaacatcgcggacttattttcaagaagcaatgcaggaactgaacagaaacactgaaataatctacaaactttctgaaaaagcaggaagctgcagcctacactgtgagtcaggtgaagggctgggagtccccagcatttgagggagaacagccaaaaatttcagccagtggtcccaagttgaaagtagctctcaacaggggtgtgtaatataacctagggttgggacgaactcccttggccagggcctgggtagggaagtgttaaaagtggtctctgcaagtttaggagccatgggtgcaggagctggtgccctgctttgcagcagacaggaaggggcatggcatgaaacccatggctgcagtctccatggggacagcctatgactcctggcatttggaggtattgatcacagattgactgaaactcatctcactgctgccagtggaacaccacgggagtggatcagcctcaccaagtatgtgggaactgtgtggggcctaccaccacctgccactccccaccccctgcccaaacttctgtggaggagaggcagccatggtcccatctggaacatcatcccagtggcctgagaaccacccctgtcccccacacccacaggggctgctgcttgccctgcatacagagactcagaggggaaacccacctggcccaaccctcaccttgctttgtgcagccacctgccctggcagcttaacacaaaagacagcatcttttgggagctacatagccacacccactgcctaagaatccatagtagcccccatacctgggcaacacaaggcttgcaaaaatcccaccgctaataatgcagctggtgctcttttgcaagcaccacctcttagctggaggccaaccaactatgcattacagcatctcctagtagactaacactgcatcctggaaggagaaaatgactgtgcgatctcagttatcaccatggcctgcaccactttggatgaccaggagatcctgagtctctccatgtgaccagttcattgctactatacccatcattcaagaaagccagtacacaaaggctatcaatatccatggaatttcacagagtctccttcactctcctgcctgccactcccatcagacccggttctgctgttcactgttgaaaaatatgaggacagttcacatcactggatcacttagagacatttgcccacaccagcctgaagtgtgtcaacgtcactgggcagctagacctagagaagaaacataactcacagtaccatggctcccaggttctcctcctcttaggggaagggagtgcaccacattgagggaacacctcatgggacaagagaatctggatggcaggccttggacaccagatccctccactggtgggaaacttcttctagcagaagtacagttgcagcactgggctcagctgggaaagtcttcagctctttctcaacagacagccctgttgcttgtgaagaatcttgaagaagaggaagcctttcccccttgtacaccactgtaggcacacttggggtctctcccacaagacctcagcatgggtgcaactatagacagcctttctggaacacatcattgtgactgcatcccccagaaacagcactttctggattcaggcttgcatgagacagagagtcacagttcctctctatttggcacatgaacatttgtacagatgaaaaaacatgcctgtcttatctgaatagccggaatactgggacagcagtatgtctgagaggtggataaatttcctactgacttgacaagagagctgaggtggttccaacccttcccaccgataagacctcagtgggactcactaaaacctctttcagccaactctgtcaaggctgggacttaatttacccacctgctttagccacaactagtttctacccaaggaaaagtcctccactgatgtgaagcttgagccatcaagcaaataaataaatcactggggacaaataaaataaacatgtgcatgccacagaggaatgagataaggtttaagagacctctaccattctaaccccatagaagacagtgaacttgctcacagaccgagcagatttctactgcaatcaacacataggaaagccatcatacaaagattctccataaccccggaactcttacagagtcttcacccctctaaggaccaaaaaccaaatcaggttgtaattaattataagcattaaagtctcattcttaagggaaaaaaatccatttaaaaacaaacacaagaaacagtcaaatcaaacataaattcaataataattagaaaatctaccaaaatgagaggaaatgagaaaaataactggggaaaaatgagaaaacagggtgctgtgccagtgccaaaaggtcacaaggtcacactacctctccagcaataaaccataacaaaaatggagtctttgaaatatcagaaaagaaaatcagaatgttgattgataagctactcaagaagatatcagaaaaaggcaaaaatcataataaataaatttataaaactgttgagaatatgaatacaaatttttacagagagatagacatcctaaagagaaaccaatcagaactcctgaaaatttaaaaaaatgcagggaattggaaagggaattacaaaatgccatggaaagtttgaaaaatagactagaaaaaagtagcagaaataacaatagactagaaacagtacaaaataaaagtagaagtaaaatattcgaggaaaaagaaaaaggaaacagttaaagaaaaaagtagaaagaccagactattattgaaataaccaaatcagagaaaaataaatttaaaaagagccaaaagaagtgaaaaaagtctccaggaaatatgggattatgtaaaacaaacaaatttaagaataattggtgctcctgaagaagaaaaaataataataagtttgggaaaacttctctgaaggaataattgagaactacttctctggcctgactaaagacctagatatccaaatccaaaaagttcaaggaactcctggggaattcattgcaaaaataccttcaccaagcatacagtcatcaggctacctaaagtctacatgaaggaaataattctaagagcagtaaaacgaagaaacccatcagaataatggcagacgtctcagcagaaacttgacaagcaagacagattagggttctattttcaaactccttaaacagaaaaactttcaaccaagaattcttttttatcccgccaaactgttttataaataaaaaagaaataaagtcattttcagaaaaacaaatgctgagggaattcatcactatcaaaccagcactacaagaaatgctagaataagttctaaaccttgaaacaaaaggccaatatgcacaaaaatggaacctcttaaaaattaaaaactcacggggcctataaaacaataacacaatatcaaagaataaacaaaattaggtaacgacatgacaaagagaatagcaactcatatctaaatattcacattgaatgtaaatcataaaaggcatggaagaaggaatttcacaaaaatagaaaccaggagtgagcaggactagctatttttgatctcagacaaaacaggacttcaaagcaaaaacaatttaaaaagacatagatgatcactatacaatgataaaaggatcaattcaacaaaaaattacaattacatatttatatgcaccaaacactggaggaactagattcattaaacaagtactgctagacctaaaaaactgagagagttagcaaaacaatcataatgggagattttagtacaatcatgacagtactaaacagatcttcgagacaaaaagtcaacagataaacaatgcacttaaatgactcactggaacaaatggatgcagcagatatttacagaacattctatccaagatctgcagaatatacattcttctaatcagcacatgcaacattctccaaggtagagcatatactaggccacaaaacaagtctcaataaatttttaaaacaatgaaatcatatcaagtatcttctcagaccacagcagaataaaactaaaaatcatctcgctaaagaactgtcgaaaatgaacaaatacatagaaattaagaaatttgcttctgaataatatctgggttaacagttacatcaagatgaaaatttaaaaattatcttaattaaattataataatgagacaagttattgaaacctcaaaaataaaggaaaagcagtgataagaggaaagtttatagtgccagctgcctgcatcaaaaagtctgaaagagcacaaattcacaacctaatgtcacaccttgagaaattggagaaacaagaacaaactaaacatagagccagaagaagaaaagaaataacaaagatcagagcagaactaaatgcaatccaaacaaaaaaaagcaatgaaacaaacagttggttatttgaaaaaataaacaaattcatgggtcattagctagattaacaaagaaaagaatatcaaagatccaaataagctcagaaatgaaacgagacattacaatctacaccactaatataaaaaataatttgagactactaagttcaccttcatgtgcacaatgtagaagacttagaggaaatggaaaaatttctagaaacatacaacactcctagattaaataaaaaagaaacagttactttgaatagacaaataacaaacagtgagattgaatcagtaattcaagaattgccaacaataacaacaatgaaatagggccaggtgaattcacagctgaattctatcaaaaaatttaaagaagaattgctgccaattttgctgcaactattttttaaatttagataaaaaagaatcctccctaaattattctatgaagctagtataaccaagataccaaaaccaggaaaacacacacacacagacacacacacactctacagatgaatttccctgataaatatagatgcaaaaatagcaaaaaaaaaaatagctagttgagttcaacagcacatcaaaaagataattcctcatgatcaagcgtgtttcatctcagaattgcagggattatttgaacatactcaagtcaataaatgtaatacatcacataaacagaattacaaataaaaaccttacgattgtctcaatagatgcagaaaaagcattcaacaaaattcagcattttttaatgataaaaactgtaaataaatgaggcatagaagaaacctgcctcaaactaataaaagttacatatgaaaaatccacagctaatatcatgctgaatgtgaaaaagttaaaagcatttaccctgagaacacaaacaatacaaggatgcccaagttcaccaattctattcaacatagttctggaagttctagccagagcaattagtcaggagaaaaaaaataagggtatccaaatttaaaaagagaacgtcagactatcactgtttacagatcaagggattatatatattaaaaccctagactcctccaaaatactaatagttttagtaaatgaattcagttaagtctcagattacaaaatacatgtacacaaattagtagcacggctatatatcaacaacagcaatgctgagagttaaatcaagaactccatcccttttacagaagctgcgaaaagatagtatatttaccaatatacttaaccaaaagggtaaaagatctcaacaaggagaactacacaacactgctgaaagaaatcatagatgatacaaacaaatgcaaatgcatcccctgatcatggattgcaagaatcgctattgtgaaaatgaccataatgcctaaagcaatctacagaatcaatgaaattcttattaaaataccaacattattttcttcagaattcaaaaataataacgctgaaatttatttgaaaccaaaaaaaagccaaaatacccaaagaaatcctaataagataaagaaaattggagccatcacattactgaacttcatattacaccacaaggctgcagttaccaaaacaacatggcactgacataatagtaggctcatagaccactggaacaaaatagagaacccagaaataaagccacatatgtaaatccaactgatgctttgcaaaatgtaccaaattttaaattgaaaaatagacaccacatttaacaaatggtacaagaaaaactagcaagccacatgtaaaagaataaaactggatttctatctgtcaccatataaaagaccaactcaagatgaatcaggtactgaaatataagacattaaactcaaaaattctagaaaacaatattggaaaaacacttttagacatcagggtaggcaaagaatttataactaagaccccaaaagcaaatgcagcaaaaacaaaactaaatttatggaacccatttaaactaaagtgtttcttcacagcacaactaagagtcaatggagtaaaaagacaactcacagaacgggagaaaatatgtgcaaacttcacatctgacaaaaaattggtatattcagaatctacaaaatactaaaacaagtcgccaagaaaaaacaaacgatcccatttgaaagtggacaagggacataaatagatagttctcagaagaagatatacaaatggccaacaaacatatgaaaaactgtgtaacatcactaatcatcaggaaaatacaaattaaaaccacaatctaataacacctaatcctgcaagaatggccactataaaaagtcaaaaaacaaaagggaatgcttatacactgttgatgaaaatgtaatttagtataaccactatggaaaacactattgagatttcttgaaaagcagaaaggtagatctactattttttttttcttttttgagatggagtctctctcagtcacccaggctggagtgcagtggtgcaatctcatctcattgcaacctccgcctcccgtgtcaagtgatgctcccacctcagcctccggagtatctgggattacaggcacccaccatcatgcctggctaattgttttttgaatttttgtagagaaggggtttccccatgttggccaggctggtctccaactcctgacctcagctgatcctccccgctcggcagcccaaattactgaaattacaggcgtgcagcatcacacctggccagatctactgtttgatccagcaatctcattactggagagctacccaaaggaaataaagtcattatatgaaaaagacgtgtatatgtatgtttatagcagcagaattcaaaattgaaaatatgtgaaaccaatttaaatgcccattggccaatgagttcagaaagaaaatgtgacatcgcctgtaatcccagcatttcgggaggccgaagagggcggatcacgaggtcaggagatcgacaccatcctggccaacatggtgaaatcccgtctctactaaaaatacaaaaaatttgccggacctgttggcgtgcacctggagtcccagctactcgggaggctgaggcaggagaattgcttgaacccgggaggcagaggctgcagtgaaccgagattgcagcactgcactccagcctgggtgacagagcaagactctgcctcaaaaaaaaaaaaaaaaaaagaaaagaaaagaaaaagaaaatttgacatatatacatcatggaatactaccaagccgttaaagggaatggcataatgtcctttgcagcaacttggatgaagctggaggtaatgagtataagtgaagttacacaggagtagaaaagcaaaaactgtgtttgcacacttacaagtgggagatgggctatgaacttgcaaaggcatacagagtgatataagggactttggagactcagaagggaaagaataggatggatactagagagaaaataactacactttaggtagagtgtacactattcaggtgatgaatgtactaaaatctcagaatttattgctatataattcctccatctaacaaaaaaatatttacccccaaagctattgaaattaaacaaaaatcaacctacaaaaataagcatcttctgtatacactaaaaaatgattattcaaaattaaaatcaagaaaataaatctaaatacaacagcttaaaattcataaaataaattttaccaaaataaatttaacaaggatacaaaatatctgcacattgaaaattataatatattgattaaaatgtaagaaaacacaaataaatggaaggctatcttgtgttcttgtgttactggaacatacattgttaatatgtccatcctaacctaagcatttacagattcaatgcaatcccattcaaaatttcaaagatatgcatttacataaattgaaaaaaaaaacctctctcatttgaatggctggggtgattgacccggactatcaatttgaaatcagactactactccacaatggaggtgagacagagtatgtctggaatacaggagatttcttaggacatctcttagtattactttgccatgggattaagatcaatgggaaaaaacaacctaattcaggcaggaatacaaatggcccagatacttcagaaataaaagtttgggtcttcacccagattaaaaatcctgaccagccaaggtacttgctgaaggcaaaacaaatacagaatgggtagtggaagaaggtagttgtcaataccaggaatgaccacacgaccagaagtggggaccgtaattgtcgtgagtatctccttaagctgataagcaacttcagcaaagtctcaggatattttctccatatcttgttaggaatatatttctgcatgtgtataactgtactaagaaaatatcttcattgtgccggacacggtggctcacacctgtaatcccagcaatttaggaagccaaggtgggtggattacctgaggtctagaggtcgagaccagcttgaccagtatggtgaaacgccgtctctaccaaaaatacaaaaattagcctggcatggtggcaggtgcctgtaatcccaggcttctcagaaggctgagacaggagaatagcttgaaccctgaacccgcgaggcagaggtggcagtgagccaagattgcaccactgcactccagcctgggcaacagactgagactccatctaaaaaacaaacaaacaaacaaaaatatattaattgttttcattgaatttgttttctttttatcatgtgtcacaagatttattgacttcctatcagcatttaaatgttgttaactatatgtagtggtatgtatgtaggttaaggattagtgcactttcagttgtatgaaggatagctgtattatgttaggcataattatgaccttattattgtctttatttggagttcaagcatgattgcagctagatgtgtaggggtgctaagttgacaagaggtgggcttttgatgcttgatactaggtgtcaacttgattggattaaaggatgcctacgtggctgggaagtattgtttcttggtgtgtctctgggggttttgccagaggaggctgacatttgagtcaatggactggaaatttgagtttgtcatgttgcatgatccttttaaagtcttatagaacttagttgactattattttggtgtagttcatttgtataaatatttctttgaagtttaattttcttcctttgcgtttgtctgtcactggcaacacggtaattgtagccttttagaaatagcttagaaggttggcgactcatcattttttaaaaaagttagagaacagttggcatgacttttttaaattctgagagccattttttatctaacatataggctatcatgaagaatatttatagtgtgcttgagaagcatgcgtattacactgcgcttggttggaatgttctgtagatgtctattaggtcagtttgttcaatagtgttgtttaagtccatgggcttcctaagaatttttttatgggtgttctatacattattgagggtgaggtgttgaagtctcctcctttcttattgttttctatttctcacttcatatctcttaaactcttgttaatgcggttatatttctatttttataactatgtaaaatagaaataaaataataattgcttagtaattttaatgggaaaatcacataataagaaattatattttcccaaatgctgccatcaccactaaactcctccaggagtctcacatctgctctgggctctgctctctcctaaggggtcccacatcagagtttgctacagaggaggagacaagaaaatagggccctccctctcctgatgaaaaccagccctgccctgaccctgcaactctgggagaagatctctagtccagaattaccaggagtttggatttgatgatcagctctgtacaaacatggctcaccatagagttagggctgagctgggtttcccttgtcattattttaaaaggcgaataatggagaacttgagatatggagtgtgagtggatatgagtgaaaaaacagtgattctgtgtggcaggttctgactcagatgtctctgtgcttgtaggtgtctagtgtggggtgcagatggtggagtcttggggagagttggcacaagctgaatgtgcctgagactctgccgtgcatcctctgaatccaccttctgtagctactagatcagctgaatctgccaggctccaggaaaggggctgcagtgagtagtagatataatgtacgatggaagtcagacataatatgcagactctgtgaaggtcagattcaccatctccaaagacaatgccaagcacaggttgtatctgcaaatgaacagtctgagagctgagaatatggctctgtattattgagtcaaaggtaccaaatgaagggacatcagtgtgaacccagacacaaaatttcctgcagggaggagggaggaggctgggctgcagtgggcactcagcacacacaaaaggcagggacagttccaggggcaggtacaggtgcaggtgaaggcaaaggtctactttccttccagatctgtggattcctctgcatccaacagttcgcctgggcctctgtctttatggatctgcgcctaccactgatgtctctgggttagtaaagtttgctactataggaggaaacattgtcatttgtcagaaaggcgaataatggagaacaaaagatattgagtgtgagtggatatgagtgaaaaaacagtgattatgtgtggcaggttctgaccaaaatgtctctgtgtttgtaagtgtctagtgtgaggtgcaggtggtggagtgtaggggagaggcaagaggcagaaaagcgcgcaggaggccgggtgaggctgtagacattgtcagctcactatgccaatctcacaacagtgctggagaaggtgggagtctgatggagcttcccaacaaccctgtggtctaagctaagtccattaaggccgctggttcctcctggaacatagctgtccatcaggaatcccccatgtgcccagcagcagccacgcgttagcatcttcactgtgcacagtcattgtttgggaggagctccaggatgggtctctttgtcaaaaaccgggtgatggtgtcagagagctgtgccgggtgcctggtccaggggctccctgacgttggaggtataggaggtgcgttctcagggtgggaacaccttttatggaaatgtacagaagaaaacatgattttccttggtcctctcagatgacatggagaagaaagcgcgcagcttgcaaacaattgtaatgtccttgtaatttcctactttatcccaagttcattgattcttgtaaaccttggtttctgtccaagtacagagatattgattagagtgagtttggttctttccacacactaaccctcacctcccccagataaagagcacattgtccttactctgagtctgagggaggagctgttcctgtacaactaagggcctgcagagacccccatgtacagctttgcagagtcagatctttccacatgtgaggcgacctccacggcccatgattgctgctcaggtctaattgtggattcaggattaggacatcctttaggctatcacaggtcaatcagattctgaaaaatcactgttatcatagacagaggtaataattcaatacccactcccctgacagcagattctctttcttatttggttgaaagtttgaagaaaataagtgaccatttattattcttattctaactttagtatccactatttgttctaggggattcacaaatttcaaaacactgagctcttcattctcatgaaaatgtgcatatttgtgaatttcaacgtgttgttcagaacctgtgcatgccgacatctgtatttctcgtgcgttcttggcctggcgaagccctcacagaccctctccctcatctgtgctgtctctgcttctccatcacaaccagtgcttcctgctggagctggatccctcagctccccagggaagggactggagtgaatcaggtgcacaggtcatgagggagaacacaacgcaacccacgcctcaagagtccagtcaccatctccagatccacatccaaaacacagtttcttctacagctgagctacctgagcaacgagtacacaaccatgaatttttacacaaaagatacagcaaggggaagtcattgtgagcccagaaacaaacctccctgcagggaagctcaggaactgcgggaggccctcgggacaccagggggcgctcaggacacacatcaaggcaggtgcaagaggaaaaggtgctggagatggggtttggcatcatcatcatatttcactgacacccgccactgtgtttattctcatgtacgtgattctttgtattattagaaaatggcgtttatgtaaataaataaccatatgtaggtgcatcaagtcgtcctctcccttttttttttttttttttttttggagtcctgctctgtcacccaggttggagtgcagtggcgcgatctcggttcactccaacctccgcctcccgagttcaagcgattctcctgactcagcctcccgagtagctggaattacaggtgtgcaccaccgcgcccggctaagttttgtatttttagtagagaccggatttcgccatattggccaggctggcctcaaactcatgatctcagttgatccgcccgccttggcctcccacagtgctgggattacaggtgtgagccaccgcgcccggcccgtcctctccatcttatgtggaacttttccattaagactctgagtccctggatttatttgagaacctcataaatcatggtcaattatgtctctttctcctctttctcccttcttcactcctctctagctcacaaactgaaacacacacagaattttctaacttcaattacctgatgtgttgaagacaattgattaaagcgcagcttttccagttcagccactgttcatattgttgtaagaataagaacgttgtgtttctcagctgcgtgcttctctaagatgagtagcagcttttttaaataatacccagaggctgaaagcaatctgaataccaatcatcagcttaatcagtaaacacaaggtggtaaattcgctcactggaaaaacaccgattgttacaatcaggtaaggctggatactctcaacagcaagtgtaaattcacaagtatatatgctgattaaaataagacaaacaaatacaagtacatacatactgttccacttttacaaattctataaaatgaatgctaatctaaagttacataaagaaaaccagtagctgactctggacctggtgtgaggagggaagggttaggaaccagaaattgtaggaaatgaagaagaaatgctgaaggtagtggagttttttctatgttgatgaaggtaatagttatgtcactattaatcaaatcgtacacattatgggatgcctattatttgtgaatttcaccctattaaaatattacaagttaaaacaagtataattttgtagaaaattagttagacatagatgaataaaatgtatgataaataaaaaaagaaaatcacagaacaatagcataaggacttcactcatcaaactgaagaaattttaaatttctcaacacagaattaaagatttaattagatatacataagaaatcaaagactcctggatatacacacaaataaaccctaagtccacctgtatttttagggaaacgctagaatacaagaaaataatgtcatgatttcattacataacgggggttaatgaaaccacatcaggcatgtccagctgtgtcctggggttggttcagggaacgggtgtgtcctgtggttaggagacgtggcaacaagctcacagcatcagttctagctgacaccataaaaaggccaagagatcacaattaaaatgtcatgcggatgtcacatctgtgggtgcggcacactcccccatgtgaatacggaaaggttaactacactcttcaggtgtctgctgagagtagagctgtctctcaggaatgtccaaaatggctcaatagagcaagaaaggagactggctcagggttcctgtagtgccttggtggtgtgggcagagtgagggttctcactcaagaaaggagtttgtggcgtttgaacatctacatggcttcaaatagggtaactcctgtgattcctaactagattcacctcgtgtgggaaagaaaggagatgatgaaggaatgagccttaagttatcagcagtcagacatcaaaacaatagtctgatgacttattctatgtagcacctataaaaatcgttccgggcgcggtggcccaaacctgtcatcccagccttttgggaggctgaggcgggtggatcatgaggtcaggagttcaagaccagcctgaccaatatggtgaaaccccgtctctactaaaaatatttaagaaaaaaaatagttgggttatggtggtgggcgcctgtaatcccagctactcaggaggctgaggcaggagaatagcttgatcccagggggcgtaggttgtagtgagctgagatcacaccactgcactgcagcctgggtgacagagcaagactccgtctcaaaaaaaaaaaaagagtaaaaaaatatcagcccaagatgggtggacaacaaccaggcctacaaaaaaggagaagactccttataagaataagcaaatcataatgaaaattaggaggaaaacaaggagagtgaggtgaaaggcatggggcaggggattagacaagggtcctgttccaatgtcttgtgtggagacttttcactatctaaaatcatccacctattctgaatgtcttaggtgaactgtctgctccaaaacatcagaaccaccagaggatttttgaggatactcagtttaatatcttatatttgaggtgccttacaactgtgtaaaatgcttagttattatcagtgtaattagagatagggcctcactgtgtcacacaggttggggttcagtggcacaatcatagctcactgttaccttgaacttctggcccacataatccttctgtctcagcctcctgagtagcatggactagagaggtgcaccaccacacacagctgatttaaaaaaaattgtttcatagaaatggggtctctctatgttgcccaggctggtcttgaactcctggtctcacgtgattccccctggttttgtttctcaaagtggtggaattaaaggcatgagccaccgtatctgctcagaaatgattattttgttgcaaaatactaacccaagaattgactccctgaattttctctgcagcattttggttaatagtgtctgataagatttatttcaatagtttcaacagcagagtgttctcctgatgtttcctccaatagtgataatttcatggttgaagatcacaaactactattaaaagatgacataaaaaggcaaccttaaacttttggtgatggagtgagtataataaaaaattactttcaatattgtgtaacacacgcctgcagtaggaggaaggtgagcaatgagggtaaaatttctaaacgtatgaatcttccagctccccagtcatagggcagtaactgatgagtcctgagagagggaacgtaatgccgtagtgcttgtgggataactcttggccaagagagtttccatattttattaaagtggttataatttttaaatttaaagatgccattttttcaacatatccagaatattgtgagcgggattgattctgtatgatacgagcaatggcgatgccttctgtttggataatattacaaaccaggttaagactgagtggtgtaacgatgcaccagaacattattctagcttccatactagattttgtttttctctttgtttgcattagtttcaaatttatatgtaaggtctctagaatgtaggagtttatttgaaagtgtcttttcttgttggccattttgatggggcttccaggagatttaaaaacctcctctgcctgcagcacagtttaaaattctgcgttacagtagaacatctgtatttaatcctggtctttggttgattgacaagctctaatacatgcaataacttctgccttctgggctggttttacatcaggtagaggaatatatactaagtgaaaatttgcactagtaatatatattattaataaccaccacttgtattatttaagtgttattaatcaagaattaatgttaaatcaagggtctcaatggcaatattacctaagggatatacaagatattttgctaatctaggtaaaatagatgtgaacacactcttagtatccagccatgtctcctgtctatcacattattaaccacacagtaaattcacttgggacttgttctaattatctaattagtcacttacttatctcaaagcctctggattattatgtgtgactattttagcagagagtgaagaaagacaacccaggctgaccaaacaatgaggaaaatcacaacctgatgaaaccagaaacctggatgtgagtggctccaggattgaataatttgacagctcatgtgcccaggctgtttcttgtctcagttttccacactgatacatccagaaaggcagcttcaccccccagaggactcccatcatgctgtgacatggtgacaacattcccaaagctcacacacatatgttaaatattggctggaaaaggggcagagacatttctggaattctcttctgaaggaccatgaatgcctcaaccaaccatctcccctgcctccatgactagaaatgcaccacgtgcccacacggatattcatccctcatggggataagactccattgatgaggctgactattttatcatataaaattactaaagactgatttaagggtttcaaaaactaattgaactctgttgttctatgtccaccagagattacaaatcttccaatgatgccttctttgttttttgtctgcttgactttgtctcttcaacttgttctgtaccccagagaatctctttcagctccctcaggtgcattcaattgttttatttaactgacaatttctaaatcagttaaagacattacgctaaagactccatattcctaggtccatattcctttttccatattcctaggaaggcattgtgacccagagtctgggcatgaccttgtgagtgttcctgaccctcctccatatgagatgctggtctgggtgttcttgcccctttccctggggtagagtcctcctgttttccccaggtgctccctcccacagctctagtgttctcaatcagtgtcatcaccttccagatcttctgccctgccctgcagactaaggctctgattccataagcaagataggggagctgctcctcaatagatctttggtgaggatctctgttcccatctcaattcctgtagggtggaaccagtgttcctaggattctggtttcagtagcttgtccctgcagagtaaattcttagttctgtagggggattaagggagttgggtctgaatacattttagatgtcgaggatcttgttctctcccagaaagacacttcgggaaagtaagactttggtaactgtcccctttcttggggaaagggattcaagaggataggttgcttttgggcatgtggtcccttaaaatttcacactaaaaagcgtttcccacactcaatttcaagcagcccaatatatatttgtattttttcttggaacagacaatattttatattccagactctgccttaggtaatttcaaaccctggctttgttactctctacaagaaattgcttctccataagcttcagatttgttgtgtgttttgaaattttatcagaaatattaaagaaaattggcaaaattccatcctccatgtttatctgttattgttgatgcagttgtaaaaaataagaaaaatatattccttttttctgtacatttccaagcttagtagcaaatttttagtaacacccagaataataaaaaattcaaatattgtttagctgcttaataggaaaacaaattatagtaaatttgtttgctagaatgctacccagcatttataataagtaaacatttgatatacccaactacaaggtaaaatatccatttatgctaactaaaataagccaaacaaatgagaatatatactgttatttcatttttataaattctgaaaaattaaaatgaatttgcagcaatgtaaagatcagtagttgccagggaaatggtagaagaaagaaaggaaaaggagaaagaatacagaagaacaaaaggaaatgttaagaattctcttgtccaacttgataaggatgacggttacatcatttttatcaactgtaatctttaaatatgtgaaagtttattatctgtaaactaaacgttataaactttattacaagcaaaaattgaaagttagacaagaaggagtgatagaaagagaaaatgtatattaaatttcagaaatatttaagaatgtatctgcctgaaccctagttctcaccatatctttaggtgaatgctaaaatgcagcaaaatcacgcatgttctcactacagaaagtgggttctacaaaccacactcggcacatttagctttgtcctggagttggtgcagggagttattggggccagtgatgaggagcacaggccaagataccagcgattacttatcccaaacatgagctctaacatacacacttagtcccttttccgtgtgtggtttacttccacatctgtacatggagagaccactgactgacaaaatataatttatacaaatatgtaaaattaaatagggtgatcagttcaaggtgtttatcacagcataattttacaataagacagcatatttcccaaataccatcattgtcaccaaactccttcaaggcacagtcatcttatctgggccccgtcctctcctcaggtgtcccaccccagagcttggtatatagtaggagacatgcaaataaggccctccctctgctgatgaaaatgagcccagccctgaccctgcagctctgggagaggagccccagccgtgagattcccaggagtttccacttggtgatcagcactgaacacagaccaccaaccatggagtttgggcttagctgggttttccttgttgctattttaaaaggtaattcatggtgtactagagatactgagtgtgaggggacatgagtggtagaaacagtggatatgtgtggcagtttctgaccttggtgtttctgtgtttgcaggtgtccaatgtgaggtgcagctggtggagtctgggggaggcttggtacagccagggcggtccctgagactctcctgtacagcttctggattcacctttggtgattatgctatgagctggttccgccaggctccagggaaggggctggagtgggtaggtttcattagaagcaaagcttatggtgggacaacagaatacgccgcgtctgtgaaaggcagattcaccatctcaagagatgattccaaaagcatcgcctatctgcaaatgaacagcctgaaaaccgaggacacagccgtgtattactgtactagagacacagtgaggggaggtcaatgtgagcccagacacaaacctccctgcaggggcgcacagagccaccagggggcgctagggaccgcctgagtacgggacaggtcccaggagcaggtgcagggggaggtttcctttttccttggctggaaaagtcacctttatcttcccagggctcgagccttctaggctgtgatattttattacttgtatttactgttcatttattatcattagtttttaaattttggtaatttttacaactctatggatatatttttaagtgtatactttcaagaaataaacattcctaattatttgcactgattctcccagagttttattaacatttgttgacatcagcaactacatagctatagggacaaacacttttaacgatagacagttgtttaggcctgaaaccccgtttatactaaaaatttacaaaaattagcctggcgtggtgaagggcgcctgtaatcccagctactcgggaggctgagcaaggagaattgcttgaatccgggaagcggaagtcacagtgagtggagtggactgccactacactccagcctggcgacagagcgagactttgtatgaaagaaagaaaagaaaaggaagaaaggaagaaaggaaggaaggaaggaaggaaggaaggaaggaaggaaggaaggaaggaaggaaaagagagaaagagagaggaaggaaggaaggaaggaaggaaggaaggaaggaaggaaggaaaagagagaaagaaagagagaggaaggaaggaaggaagaaaggaaggaaggaagaaaagaaggaaagaaagaaaaaagatatataaacacgcagacctatgcatataaccatagggatttatattaaacattacaataaaataattctaaaaatgtgtcctaaggaatcaaacataatgatgaagtaaatataaatgttagagtaatttataattgatttgttatttttaatcgtttacatgaatttatttctatttgttcatttaaaagtagtatattggtcatttcaagagagctaacagtaaatttcagatgttgttgttacgatatatgataagaatttgaggtggtgaatgataattatcttatttctcaattatcttagttattccatattgtattcacaaatcataacattgcttcttaccttataaatataaacaaccataatttgtgaaattacaataattttctttattttaattttttaatttatcccagatcattatctttttcttcgcttccagatctcactggatcatctcgagggcccatcctcacccctgtctcccgaagacttctggagaggctgcaggacgggcagaaggaggagccccgtgtgagtccacacgacctggagcctccctctccttggattaggccatctcctcgggatcacagggctcttcattatccttaccccgctgttgtaccaaacaagcaacatcacacttcaattcatcagggtttgctttaattttctaaatcatcgtgaaggtgataattttaacagtaacgtatcacaaccaaataggataagcccttttccatggaacagggtttcttatcaggatatacatgtattatggattctcaatttatttgtagatgagatgctattatctccatattgtagatgattctgctaagtcatctcttaaaattaatttttccaaagactcaaacaaataaatgatataattacaaatttcaggtgtaatagctgagccaacattgagattatattaacatttagaacatgaacttgcaaatattgttattttcctgtcggctgtccccaattgtgattttatacagaatattagaaatttatcctgataaatcaggttaaaatattatatcactagtttattaacttttataactaataatataaaatgttccacatattttttagccatgttttacttacccgtgatatgtgtatttattaatttttcattttaagatgccacctttatctttcttatttctgggattttattctagtagatagagctgaatgcattttaataattatcataataatcacatttacattttgcattttaattttcatatacattttattaatattttaatttcaatataaaatattttcctacaaatgtcaatttttgatttttatgagataaaattaacctatacaaaatacatatattttcaatgtacagtttgagggtttctggcaaatgtgcacacatttgtctccagcatctaagttatgatgaggagcaggtccatctccacaacaagtgtcctcttcggtgcttccagtcagctctcacataaggaattttttttcaaatttaatatagatacagagggtaaatgtttggatttgtcacgggggattattgagtgatgctgaggtttggaatacagattcccaccgacctctccctcccactctccagcagtccacagtgtctatcattctcataattatgtccatgtgtgctcaatgctgaggtcttacttaggagaatatgtggtattcagttttctgctcctacattaatttgtttaggattaagggccccagcttctttcattttactgcaaaggacatgatttcattctttttcatggctgtgtagtattatacattgtagatgtaccgcattttgtatattcagtctaccaatgatgtgcatctggtttgatctatgtcgttgccactgtgaatagcacagcaatgaacatagatgtggatgtgtctttttggtagaattatttgcttacttttcagtgtataccccgtggtgggattgctgtgtaaaatgatatctctgttttaagttctttgagaaatctccagtctgatttccaaagtggaaacaccaatttatattcccctcatcagtgtatgtgttctcttttctccacagtcccagcagcatccattgttttttgactttttagtgataaccattctgagtggtgcgtggctgcacacctacagtcatctcatctttgataaggctgatgaaaacaagcaatgaggaagggactccctgttcaataaatggtgctgggacaactggctaggcatatgatgaagattgaagctggatatctactttcaacatgtataaaattaacacaaaattcattaaagttttaaatgtaagacctcaaaccataaaaatccttgaagacaacctaggaaatactcttcttgacatcaggtttgacaaaaaaatgttggctgagtatccaaaaccaattgcaacaaaaagaaaaatagacaagtggggcctaattaactgaggagctcctgctcagcaaaacaaacaaagaagcaaacaaaactaacagcacagtactcagacaacctacagaatgtggaaagatattcacaaacgttccatccaacaaagccgtaatatccagaatctatagggaaattaaacaaatcaagaagcaaaaaataataataataataaccccattaaaaatgggctgatatggtttgctgtgtccccacccaaatatcaacttgaattgtatctcccagaattcccatgtgttgtgagacggacccagggggaggtaattgaaccatgggggcctgtctttcccgtgctattctcttggtagtgaataagtctcaccagatctaatgagacttatcaggggtttatctgatgggtttatcaggggtttccgcttttgcttcttcctctttttctcttgccatcaccaggtaaggagtgccttttacctgccaccgtgttttggaggccttcacagccatgtggaactgtaattccaattaaacctctttttgttcccagttttgggtgtgtctttgttagcagtttgaaaatggactaatgcgtgggcaaatgacacagacacttctcaaaggaatacatacaagtgaccagcaaatatatttttaaaatgtttaacatcactaatcatcagagaaatgtaaatagaaaaatgttctgatttctgtcactataggtccattttcttgttttgaatttcatatacatggaataaaatattatagctcatttttgtaagaagcttttactatctgtgaggttcattcatgtgatagcatctatcaaggttttgtcaacatatgtataaatatgtatgtactcatacacatatagatatttcatatctgaatcagtccattgcattaataaatgacagattattaaataaatcagttcattaagtgaataagtgacaatatgtatatctattttcctgttgatggaatttaaatttgtttccaatataaatatcataaacaaaactgtcatacatatctttgtacaagttcttctgtttatattcacatatttttattgataaaatatgttgaaatataagtatgcattataccttttcagctttatggagctatcactgacaaataaaattttctgtatttaaggtacaccaattgatgtattgatattcttggggaaatgctcataatgatcaaggtaattggcatgcctatcatctcagagagttaacattttatgcctttaatttattgtgtatgtgtgatgaaatcacctaatatctacttgtctggcaaaagatatgtttataatgcaacattcattagtatagtcacattgctgtaggtttgatctccagaactatttcaacctgtgtattagtccattctcaccctaatgtaaggaactacctgagactgggaaatttatggagaaaagtggtttagttgactcacagttctgcaggcttaacagcaagtattactaggaggtatcaggaaacttacagtcatcacagaaagtgaaggggaagcaaggaccgcttcacatgctggcaggagagagagaaagagcaaggggagatgcaccacccttttaaaccttgagatcttgtgagaactctgtcacaagaacagcaaaagggaagaccgcccgcatgatccaatcactccccatcagacacctgctacaacacttggggattaaaatttgacatgagatgtgggtgaaaacacagagccaaaccatatcattccacccatggtctatcagaaatctcatgtccttctcacattgcaaaatatcattatgccttctcaacagtcttccaggcttaactcatttcagcattatcacaaaaatctatagtctaaagtcacctctgagacaaggtaaatttcttccccctataaacctgtaaaattaaaaagaagttagttatttccaagacacaatggagatgcatgtactgggtaaatgctcccattccaaatgggtgtcattggccacagaaaaggggctacaggccccatgcaagtccaaacaccagtagggcagccattaaatgttaaagctacagcataatttccttttaccccaagtctcacatccaggacacactgatacaagggttgggctcccaaggccttaggaagctccaccctgtggctcaacgtggtacagtccccatgactgctttgataagctggcattgagtttctatggctttacaggcacaccatgcaagctgttggtggatctaccattccggggtctggaggaaggtgcccctcttctcacagatccactaggcatctagtgcctagtgcccagtgggtactctgtgtgggagatccaacaccacattttccttccacactggcctagtagaggtactccattagggctcagccctgcataagacttctgcctgaatacccagacattttcatacgtcatctgaaatctaagaggaagctcccaaacctcaactcttgccttatgtgcacccgcagactcaacaccacgtggaagcaaccaaagcttagggcttgcaccctctgaagcaatggcctgagctggaccttggcccctttagccatggctggcaggagagggacagggatgtcccaaggctgcacagagcagtcgggtcctgggcccggaccatgaaaccatttttctctactgggcttctgggcctgtgacgggagggaccgcagcaaagatctctgaaatgctctcaagatgtttttcccatcgggttcctcattacttatgcaaatttctgcagcccgcttgaatttcttcccaggaaatggattcttcttgtctaccacatggtcaggctgcaatttttttcaaccttttatgatctgcttcccttttaaacataagttcaaatttcagaccatctcttaatgaatgcatatgacttacattttcagaaacagccagggcaaacattgaatgctttgctacttagaaattttttctgctagataccttaagtcatctctccctagttcaacattgcacagatctctagggcaggggcaaaatgccactagtccttttgctaaagcatagcaagtgtgagctttactccagttcacaagaagttcttcatcttagcatctgagaccacctcagcctggactttattgtccatatcactatctgcattttgttcaaaaccattcagtaagcctctagaaagtttcaaacttttccacagcttcctgtcttcttgtgagccctccaagctttaccagcctctgtccattacccagttacaaagtcacttccacagttttaggtatcttaatagcagtgcccactcctagtgcaaattttctgtattagttgattctcacactgctgtaaagaactacctgagactgggtaatttatgaagaaaagagtttagtagactcacagttcttcaggctaaacaggaagcattactgggaggcatcaggacacacaatgatggccgaaggtgaaggggattcaaaaatcttctttgcaagatggcaggagagagacagcaagggagacgggaggtgccacacttttaaaccatcagatctcttgagaactttatcaggagaacagcaaagaggaaggccaccccattacccaatcactttatattaggcccttccttcaacatgtagggattacaatttggcatgagatttgagtgggaacacagagccaaactgtatcaacctgcataactgaaagttataacctctgaccaacatcacccaattttttcctcctcccagcccctgggaactactattctactttgcttccaagaacatgaatattttagattctacatataaatgtgttcatgcaacatttgactctctgtgtctcactccacttagcaaagtgtcctctatgtgttgtaaatgttagaatttcctcgtttttaaaggcagaataatattcacttttaggtaggaataagccacattttatctgttgattcatagatggacattgacctattttctatatctaggctattatgaataatctcacaataaacatatatttgtcacactcactttattttctctagatgtatactcagaagtgggtatattctatgttcaattcattgagtaatcttcatgctgttttttcataatggctgtactaatttgcattttgttccaaaccatacatggataactttgtaccacatattcaggtctttgtttaagtcttaaatccatttttagctgatttatatgtattgtgtgagataaggtcaattttttttcttccgcatatggatgcccagttttcacagcacttgttgaagagactgtttcttctctattgtgtgttcttggcagttcatcaaagatcagtttattgggaagaaattggtggacttccagattgtctgtaatgttctgttggattctatgtctgtttaaatgtcagcattatactgttttgatttacatagatttgattttgaaattatagaatatgatatattcagttatattttacccaaaattattttggctatttaaagcttttgtatttttacataaattggagaactttttaatatttttgtaaaaccatgccatggagattatatatttattttataggcatataatagatatacctaatttatgggaacatgtaatatattgatgcatttataaacgtgtaaagatcagatcaggattggtatatctatcacattaaacgtgtatattttctttatgctaggcacatttgaacgactctcttctggccattttaacgtatacattagattatcgttaactatagtcaccttactcatctgtcaaacatttaggttgtatttctcctatataactgtatatctgtcttcagtaatcatcttctctttatcctcttctctcttgtatccaaccaggcttctggtaaacaacaatctactctctgtcttcaggaaatccaatgttttagttgtgacataaaagtaagaagatgcaatatttgtctttctgtgtttggtttatttaacttaacattatggcttccacttccattcatattgttgcaaatgacaagatatcaacatttatggctgaataatattctattgcctacatcgattatatttttatatccatttctccacctacagacactgaggttgctttcatatctgggctattgtgaatagagctgcaagaacttggagtgcacatgcctttatgaggcagtgattttatcttctttagaacatactcagaataggatttgctgagtcatcagttatttctatttttcttttattttggagtcttcatacaactttgcacaatagtggaaatacaaacggaaaaaccattataaaaagcagtttcagttttgaggtatgatccaaaaacacacaacatttcatcatgattctcattgggagtctctaatgaatctggtggaaaggcaggaagttttctaaccttgttaagaaaattatgagtttgcacctttttctttttgaggctggaaattggcatgattcaagatgcgtaatgttagcaggtttcagaatgatacagcgaaaatcataatgagaaggcaagagagagaataagagaaagacaggaaaacaaagaaacaaataaatttcacaagagaagaaactgctggatgtcagtgttgggttttgttcctagacatatctgtactgagtgagaaaccatgaagccaagggaagagtctagaacttgttcaagtgaagcatcagcatatttctccaaggcacctattgtcaccccatcacaagggtgatgagtttttgaataccattaaatatgagttcctagtaagtaatcatgtttccatgaaattcagttaaaatgcaaagggtgtgtccagatcactcacgcacaaaaatacaaaatttgcctttgcatttatggctgcatagaggtaaagtccattgagacttcagcaggttacagagatctgttaagttttggattcccataggagagtgcctcttagtgaaggttggactattaattaagtatgtacaaattccctctatgggagtagtgttccatttgtgtggaatttttaattccttattgaattgcaaaacaaatcccaaggactgactccatggagttttactgtagtgttcataaaaatatttaataagattccttccagtgtttcaaggaaagtttttctctaaaattttttctaatacataaattttcctgcctaaaattgaaacaggctgttgttaaaaagacatactggaatggcagctttaatctattggtgataggaatgagcataatacatgaatctctttgagtgttctgcctcatccaaatactgtatggcaaaggctagtactggaggtaaaatctctaaatgtatttgttccagccatcaagtcatggggcaataacagatacatccttgaggcagaggaccataatgccacagtgctagtaggagtacatgtcgccaagggagttcaagggttccttaaaattgtgataattttaatgtaagaacaccttattagagacagggtttcagcatgttgaccaggcttggtctagaactcttgacctcttgatctgcccgccttggcctcccaaactgctgatattacaggagtgagtcactgtgtctagccagtccatttattttcttctgcacatggatacccataaacttatgtggaagattgtgggaggttataacagtgtcatactttagtatcagccatacctcacagaatcattttataatagttcctttcatgggtgtacttcactcagttcatgcaaaacctggcaggtgacaggctaaaaacacaaaataccgaagcgtttaaccaactgaaagggctgtagccttttgtcaatgaattatttcaagacacggagaacacatatagattataaataaaatactttcacatccccttaaaggtggaaattgaggaaattttacctaaatgtgtccaaagggccctgtggcttggtttctgtctaggtcccaatgatagggttctcccaggattttgtggctgtcttgttacacttcatcaagaattaacctctgctgtttcctcaaagtgtttaattggataatgaatttgtctataaattgaagagttgaaatacatcaaatattaatttgtaataatctggcacaaattatctaagcaaattcaataactagatgttttttcatttatttttatttaaaatcaggatctaagcactgatatgctttaataacatctgtgaccctctcagcagttttctcttctgagtatatgatctgctgtggcagttttcttagcttcaatgttacctcttttggcaatgactaccgtctttatatttgccaggaatctgggataaaggagtgcttctaagagttccctaacttgcccattttggtgggtgttccagaacatatgagatgctctgttgttaacaaagcatcccaaagccatgcactgccctaaaatgtgtttgtttcctagtttgacaaattggaagttctaataaatacaatcacttctgccatctgggctgattttacatcagatagagggctgtattccaaagaaaagcttacattagtaatagcaattctagtcagaaacctagagttttatcattgaggtgcaattcataacaaataatattaggtcgaggttctcagtggcagtgtctaaatctcttaggtgtacagggtcttccctgttaacatgaagcatttataagcacagtcatagtttccagctatgcttctccctgtctcattatcaccacaaactatggcctcacctggaacttgggttaatttccaaataagtaattttttagtgtttatgcctctagattattatgtgagaaagttaacattcagtagaaagttaaaaagaacatttgaactgactaaacaacacagacaatcaagaataaaattcaaagcctagatgtgagaggctccaggcctggataatgcaatagttcatgtatgcaggcagtttctttgcccagttctacactgatacacccagaatgtcagcttcatgccagatttgactcctattatgtagagacatggcaatacattctcaagggtcacatgaaataatatgaaaattggtgggaataggggaggagacaactctgcaattctcatctgaaggaccaggaaagcctggacagaccatctccccagcctccgtgactgcaccacgtgcccacatggacactcatccctgatagggtaagaagactccattgatggggctgagcattttatgatagaaattactagagactgacgtggaggtttcaacaactaatatttataaccaaaatttaattacccccacattgttaccattttcttcagtgaaaaattgcttgccatgattaagttttaagtagatttccaatgttcacaactgagcttccaagagagtcttgagaacaaaaacaatgagggcagagaaatctaccttttctgtattcaccactaaactcaagtggactcagcactgcctttgatcactgctacttctctgcagagttcaggtttctacttctcacaattctgacacacattctacctctcctcaaatgtttggcctctgcttcttgtaaggtcaccctctgttcttaacttcttctctgagtcattttgtgaggtggtcatgagccattaaatggatattttatattttcccaacatgaatcacatgagtggtcatgaattatacttctgattatggcagttgatttttcttggcatgttcatgactagtaatatttgaagccatttcattcaaatcttcggggcttcgtttttgttgctatgacattttttcttctattgagtctttccactagtattataacatgacctagtatccaggctcagttgtcattaataataaccacatatgtcaaaaatcatgcattcttttcacagcagacataatttcctcttttctgcagatgaagacacactgctgagctacccccacttacaagaatatatgcacaattatgatatcttcatttatttgactaataagctatatcattctcccttcaaattctttaccccccagaagtcctggacaaatttctgcatctgctcaaacgataaactcagaactacatggtgagtaaaagtcacctggttctggatattgggtccatctcttcccctccaatgtcccagagcacctcagcacacctgtccaggttctatcaagaaagagtagctcctgcacactgaaggaaacaattgagttaagagaggacctgcagatgatagacaatattgaaaactattaatatgacaaaggattactaccaagcatgtgaaataagctcaacgggtgcggtggttcatgtctgtagtaccagcaatttgggaggcaagttgcgcagatcacctgaggttaggagctcgacaccagcctgaccaacataaagaacaccctgtctctactaaaagtacaaaattagccgggcatggtggcatgcgcctgtaatcccagctactcgggaggctgaggcaggagcatcacttgaacctgggaagtggaggttgcggtgagctgagatggcaccattgcactccagcctgggcaacaagagggaaactccatctcaaaaaaaaaattacaaaaaattagctgagcgtggtggtgggcgcctgtatacccagctgctagggagactgaggcaggagaatggcttgaacccaggaggtgaaggttgcagtgagctgagattgcgccattgcactccatcctgggcaacaagagtgaaactccatctcaaaaaaaaaaaaagagacttgcaaagggcaaatagatcatagacagacagatagatagatagacctattagtatacatacatacatatatatacactaatattcaggaaaatgcaaattcataatgagatgtcttttcacccttcatctctgctagaaagtttgttatctgaaaaacaaatacatacatacatacttattaaaagctggccaggatgcctagaaagtaaaactcatagaccactggtggaaatgtaaattagtgcagccatcaagggaaaaaaatagaactaccatatattccagcaatccaactgctaagtatatatctatttaaatatttaaaagaaaaaactaatattgaagagatacctgtacacccatgtttattgcagcactaatcacaatttctaagatatgaaatcaacatatgtgtccatcaacagatgaatggatacataaaatgtgatatatttacacaatggaatattattcagccttaacaatgaaattctgccgtttgaagcaacatggatggaatgggacaccactatgttgagtgaaatgagtcagacacagaaaaataaataccgcatttctcagcgttacttctagaagtaaatagtagagtagtggtgatgagatgccaggaatgagagaaggctgagataagaagaggtttgttaacaaacacacaattacaggtagacaggagggatgtgctctagtgttctacagcacagtagggtgactacagttaacaatatattgtacgttttctgtttacaagaagccagaagagagaattttctatgctaccaacacaaataaatgttagtgtctgaactgacgaatttgctcattgttctgattttggtcataccaagtggcacacatgtattcaaatatcacactgtatcccataaacataagcagttattatgtgccaaatttgaaaaatcctttaattaaaaagaattatattggcgtacattacaaatgattcaacacagagacaggaataaataccatttttctttgaaatagttaattaactaacaatgtagttacattcatttgcaccaaatcgtgtatttgataatggtatgcatagacagatttatgcataggataatatcttttaattttagactactacttaatactataaatataaataattttaaaacaactaagtaaaaagaataaagctgagaaaatgtgtgtgtggtgtgtgatgtgtgagctttttcttgtgcaccactgtgtccttggtggatgtgtggttcatgtgtttgtttttatttactctgtttggggttctctttgcttctaggatctgtagttcagtttctttcacaaaattgggaacattcttcgctattatctttttcaaatagtttctgtgtatttataatttctccttctcagatttaaaatatacacatactataattttgatattaatgtttagtttctttcttcactctcttttcgtttgcaatttactttgtgaaatttctagtgacatactaatcacatggttttattgaaaagctgagccagctctactgaggtgtgtgccaaaagattgctcgatgtttatacagcattgcttttgatttcttatgcatttccatttgatttattcttagtattttcatatttcagttccctatctatgtccacgatttctttaagagattcttgcgtgtgaattatagttactttacatatcttgtttaattagatatttataatatctgtttcatctacaaatctcatgctgatcatttgtttattacaactttggtacttctcattaatgtatgtaataattgttgatagccacagatactgggatggacagtggatactggccttattatttcattttatgcatttctgcctgtatttgaccacactttacctttgccaggcctttactgtggaagtatctgtgaatcttctcagaactatatttgacattcacttttgcagtggacatcaaagttgaagtctgttcttctgtgtccaccagagacttcagttcctccagtgataccttgtttttctttcctgcttggctttgtctcttcacctgttccctcctccagagaatcatgttcagctccctcaggtggattaaaatgttatttaactgacaattgtgaaattggtggaaagcaatagaataaagggagattttctgacctttcttgggttcatattgtgaacatgagtctgggtgtgaccttcccaatgtttctgaacttcctccagatgagatgttggtctgtgtgttcttgctcttttccctgctgtggagtcctcttgttttccccagttgttccctcccgcagctccaatgttctctttttgtgttatcaccttacagatttgctgactagaactgcagattaaggctctgattaaataagaaggaggggagatacttctcaatggaacttaggtgaagacctcttttcccatctcagttcctaagggattgcccagtgccctaagatactggtttggtggcttgcccctccagaataattctttgttctccagtggggatatggaaggtgggtctgaacacttttcagaagggtgggcactttttctctcctagacagacacaatgggacagaacaattttggtgactgtccccattttggggaaaaaggattcaataggataggaaaactcttcagtctgtggtcccttagaaattcaccctacaacacatttaccacacttgacttcaagaaatccaatatatatgtgtgttttcatcttgtaatagcctacattttacatgccatactctgcctcagttcagctcataccccagctttgttactctttacaagaacttgcctctccctagatttcacatttgctgtttatcttaaaacttcaagtatctaaagtattatttttaaaaaatggccagttgtggtggctcacacctgtaatcccaacgctttgggaggctgaggtatgtggatcacctgaggtcaggagtttgagaccaccctggccaacatggtaaaacctgtctctactaaaaatacaaaaaaaaaaaaatagcttggcatggtggcaggcacctgtaatcccagctactcgggaggctgatactggagaatagcttgaacccacgaggcagagtttgcaagtcgtaccattgcactccagcctgggcgacagagtgagactctgtctcaaaaaaaaaaattccaaaattccagctcctctgtttatctatttttgttgatactgttgttgtaaaacataagtaaaatatattattcatctatgtacatttccaagctgtgtagaagaatttttaataagacccagagtaaaaaaagaatgcaaatatgtaggggccagccctacagggtctgtggatctttctccccatgtgcagagatgagagatcatagaaataaaggcacaagacaaagagatagaagaaaaaacagccgggcccaggggaccactaccaccaagacacagactagaagtggccccaaatgcctggctctgctgttatttattggatacaaggcaaaaggggaagggtaaggagtgtgagtcatctgcaatgattgataaggtcatgtgggtcacgtgtccaccagacagagggcacttccctgtttggcagccgaggcggagagagagagaggacagcttaggtcattatttcttccattctcttctcagaaagatcaaagactttaatactttcactaattctgctactgctatctagagggcggagcaggtgtacagagtggaacatgaaagtgaaacaggagtgtgaccgctgaagcacagcatcacagagagacgtttaggcctctggagggctgcgggcaggtttgactgatgtcaggccttccacaagaggtggtggagcagagtcttctctaactcccccggggaaagggagactccctttccaggtcttctaagtaatgggtgccttcccaggcactggcgctaccactagactgaggagccctctagtggccctgtccgggcgtgacagaggctcacactcctgtcttctggtcacttctcaccgtgtcccttcagctcctattgctgtatggcctggtttttcctaggttataattgtagagcaaggattattataatgttggaataaagagtaatgctacagactgatgattaatgatattcatatataaacatatctataacctattactagtacaactattcttattttacatattctcttcattacactagaacagcttgtgccctcagtctcttgcctcagcacctgggtggcttgccgcccagacaaatattgttaagcttcttaatagaaaaacaaattatggtaaatgtgttcactggaatactacccgtcatttataataaattaatgcctgatacacagagcaacaaggtaaaatatctaagtatttatgttgagtaaaataagctaaacaaataagaatatatactatgtaatttcatttttataaattctgataaataaaaatgcatctgaagtaaaataatgaagataagtagttgcctggggaaatggtagaagaagggagggggagaggaggaggaatacagcagaacaaggggcaaatgttgagaagaattcacttgtccactttcttgataatgatagcagttacatcatttttattagttgtacattttaaatatgtgaagtttatcatctttcaattaagcctcataaaatgtcttacaagcaaacaaatggaaacttagacaaggaaagagtaatagaaagatagaaaaaataagttcaatgtcagaagtacctgaaaattaatgtgcctggatcctagttctctccatattttcagaagagtgctggagggcagcaaaaccacacatgctcttattacggaaagtgggttctgataaaaacactagacacatccagctttgtcctggagttggtttagggggatgtcagagacagtgatgaagagcacagggccagataccggggttcactcatcccagacatgagctcctagatgcatacagagcccccccatgtgtgggtttacttccacttctgtaaatggagaaaatattgtctcctacagaacatagtttacatgaatatttaaaatgaaatagggtgattagtgcaaagtgtttatcacagcacaatttcataataagacagcatattttccaaatgcaatcattgccagcaaacttctacagggcaccgtcgtcttatctgggtacagcctactcctcaagggtcccaccctagagcttgctatatagtaggagatatgcaaatagggccctccctctactgatgaaaaccaacccaaccctgaccctgcagctctcagagaggtgccttagccctggattccaaggcatttccacttggtgatcagcactgaacacagaggactcaccatggagttggggctgtgctgggttttccttgttgctattttagaaggtgattcatggaaaactagagagatttagtgtgtgtggatatgagtgagagaaacagtggatatgtgtggcagtttctgaccttggtgtctctttgtttgcaggtgtccagtgtgaggtgcagctggtggagtctgggggaggcttggtacagcctggggggtccctgagactctcctgtgcagcctctggattcaccttcagtagctatagcatgaactgggtccgccaggctccagggaaggggctggagtgggtttcatacattagtagtagtagtagtaccatatactacgcagactctgtgaagggccgattcaccatctccagagacaatgccaagaactcactgtatctgcaaatgaacagcctgagagacgaggacacggctgtgtattactgtgcgagagacacagtgaggggaggtcagtgtgagcccagacacaaacctccctgcaggggtccgcaggaccaccagggggcgacaggacactgagcacagggctgtctccagggcaggtgcaggtgctgctgagggctggcttcctgtcatggcctggggcggcctcattgtcaaatttccccagggaacttctccagatttacaatcctgtactaatatttgatgtctctaaatgcaaccttttttttcctttttgtgtctgtttttttttttttaaaaacaggaggacacatcctcacctccacagaagccacagtgtcactttgggggcagaaataatcctttcgtggtcaacagggtgagagttttgaggaatcccagggaaacctggggaatgttttccaattagactcagggcagagacctccatgggaatctctgattagaacaggctttgagttctgatgggagccaaaagagaggctcacccagggtcagggttcttaaaacctgatggttttcacagcaatcccccttcatcttgtgaaactgggcacatctgactcagactgattcagttgaccctctttctgctaatccattttccttcccagtagacttgattctcacagatccctttcttcttctctttcctgaaaacagaggatgtgttttctgtagtctaaattccaaggctcaggtctgcaggagctgggtaggctgaggggtcttcctcactcactattgcctggaaaatcctgctgtcttctgtgcatggaggcatttggaaaatgaagcaggcattagtcatgaagggaataatactagttttctccaatgggatgttgatgtagagctgatcttatgcttctcacactgtcacaaagtttggactctcacctgtgactttgaggagagcttgtgataccttatcttgttttaatatgaatagactctcccttagctcaggaagctggaacagactccatttggctccttcatttgtaagacatcaagggctcctcacccacccccttcctcaaggacttaacttgtttaagctgactcccagcatctcaaagagtgcgattaactgataaggtactgtggcaagctgtgtccgtagttcccaggaatttggccaggtgatggtaccctaaagcccctgcatttctgtctggcagataacacccagagcccccacacctatcatcttgtgatgaatttaaagcccctgcacctggaactgtttgcctgtaaccatttgtcctttcaacttttttgcctgttttacttctgttagaatgctacagttaggctccccctcccctctctaaaccaaagtataaaagaaaatctagcaccttcttcggggctgagagaatttccagcgttagccatctctcagttgccagctaataaaggactcctgaattcatctcaaagtgcggcgtttctctctaactcgctcggttacaacaagctgaggatggacactccattgtgcagtgagctctgggtgacagtaatcgtagggtctccccgggcagcctaaggtcaatactgctggccgtcgggaaagacaggctggaattcctgggaagacctgcatctgccatctaccacggagtcctatggtcttctgttacactctctttgaatcagcaccacctagattatctaaaacactctttgtgacttcatgactgggaaaaaataatggcagtctctactaacacctgtgttaagccatgggagcaacacctaggctagtgtgtgattgagtagttgagactgtggtctagtcaaggtgacacataaaattgattgttgccattatgatattttattttatatttgacaatataatcatgctcatattataaatatttctgttacattatttgtgtcagaggctttggaaccagaacaacttcatcttgaataaggggtaggaaaaataagactgagacctgctgggctacattcccagtaagctaaggcgttcttagtcacaggatgagataggaggtctgcacaagatccaggtcataaagaccttgctaataaagtttacagtaaagaaactggctgaagcccaccaaaaccaagatggtgacaaaagtgacctctgtttgtcctcattgctcattatatgctaagtattatgctttaacattctaaaagacactccccacagagccatgacagtttacaaatgccatagcaacatcaggaagtttccctagaaactaaagagtggaggaaacctcagctttgggaattgcccggggaattcatgaataatccttcttttgtttaacgtataatcaagaaataaccataaaaatggacaaccagcagcccataccacttctctgcctatatagtagccattctttattctcttactttcctaataaacttgctttccttttattctgtagatttgccccaattgggatccctttccagtaacatttgtgttattattggttttctaagcagaaaactctgagaggaggtgtcagccgggcttcctgggttgagtagaggctcagaaagcagtgaaactcactcatttcctgcatcaggacttactttggtcctggatgaataatattgaagatatatgcttaaaatattcctaacatcacaatttgtgcatgtgttttcttccctaagaaagctataaacagtgaaaattttgctgtaagcttccctgtgtcttctctccctctctccattccccctcccctgaaactaaaaggaatgttttaacattatgggcttttaagtctgtatttctgtgaccagcagaccttatctatgctcccaattcaaattccttgtaaacacaatttgtaaaatcctgcgagatcctgtctccttggccacgccactgcaaggtcataaagtagatcaaacttaagttacaattctgattttcctcaagatctgagacatgttaattgtctttgtttcttgctcaggtaacatctctttttgctcttttttatctctttttgcacttaaatctaagtttacattagtcatgtatctagaatgtagaaatatgtcttaaagttacttaactttttaaaaaatttatggggtttccagaagatgtgagaacctcctttatttataaaatagctgattgcacgttgctcaataatttcctctttaatttatctctctcctgtcacattatactatgataagcaaaaagaaatgaaggcataccatcaacagtttacttagatatctcctcagctaaatttctaaggtataatttactaattctaattttatccaatttaacataattaagataaattatataacaaggtacacatatgttccagttctaacaccatgtttgtgacagaaataaaacagagcttctctctgtaatgtggtcatctgagccctgaggtgatgggtcacataggtatttttatgatatttaagggtttggtcaagaacagtgataacaagtctgaacaagactggtcatacttgaaaggttacaggtaaagttactgctgttattttatattaacgccttattagaataaagctcagaggaagaggccacatcctaggtcacagtaggaggaggaatggagctgtgctctgctctccacactacttttcacatcccaggcacaagcccaggttccatgacgcacggcatctagagggcagttctcaggggatgatctcagggcacctgcttcctcgggcagggcgcttccttctctcaattgcagacttgctccttctgcaaggtctgaagtcagcacttgtattcccatgatttttacaggttctcttccctaatatggcaaaaatctttttattaaattttcaattttattttctctgaagcacactgcattagcagaaacgaatatatcacattccttatccgcccacacagccaaagattcctgaagacagagctgatgtgacgtactcataggtggatctctgcccctcagaggtggccttggtcttcaagtttcagcaatttctaggaagccaaagacacctccatctactcctccctgctcgacagctcacctgagaacagctttctcattggaatgtcttgtgtttaagaaataaaagttgctgtttgaggttagggagcccaggtgcacctaccagatccagcccaggattggagatacttttcagaagacaacatcacctgagacacgaccagtcccactgtttcactttcacaatttcagcttcttcagaagaaaattaaaattgttgagacttgttcataagcgttgtgccatgtcctttctctgttttcttgcctgttcattgatgtcatgccaggtgccacttctatgtaataggatcagaattctgcctctagtaacacatcagaggtgaggtttgattgtacttttggtttatgctccaaaacgtagattataaaattcatcaccctcatttttatgtcaaaagtaatctgcataatctggatgtcaatactttttggaatctatgaaataacagaaattgcaagaaatattacccactccaaacctggagagacaggcatgtgcagaatggcaattgacacctgcttaactggagcagaagctgcagaagccacaagctgttgagggcacttacatggtaagcactacagacgtctgaagacagatgtggactcagtaaatgtaacagttccagagggtcttatacttctaagttttctggaatttctttccagaaacctcaagattctaaaatgtacattccaaagacatttcctatagatcaaaattgcagatattaattactgagaaacataccacgagccttcttcaaaagcttctacaggaaaggacttttccagaaccttatcctatgtgaaggaagacaaatctcccactgcagatttctctcccattcttccataattgtagaaatgagtaaagttagccaatagaggtaagatataagtaaataatccagggatgctgaaaacaaaaaagggagtaatcgcccaaaatgagcttttcccctggagacgcctggtcaagatcataggccagaagaggaagctgactgtgtctctaggtttccactgtcagaacaggcagtgcttacctgcactgcacaatccattctaaccaggatgatggctctggattaaaggtgaaagtgtggcaatgcacagactctatctgaggagaacacaggaaaactaaaggacaacggcagagggtgagacaagaacagtagagcaatctgaagcctctgacatcatgatttttaagaccaatgtcttaaacactccttcattgacctcagcttctttcatcatgaagcctttgcagtgactctatctgagaaaaagaaaataacctcctgcatgcacttctcaagtctctgcttgtatcctgtttgctttaggtctctaggggaaaaagtcagatacctggacctagtgtcagtgtaggaggcacatcctaaaagctacaaactaggaagaagggaagatgggtgttattggaatagtggatatggagtgggctttcttctgaaagtatatgcacctgctggtattctcagatgcaacattcaactgcaagagcccattgaagaaacaaggcactcccaaatctcctgtaagattctgtattcatttcagataagcccacatgtccccgcattaactttttcttcagacaagcacatacatctgaaactgaacagctatgtggcaaaataagctcaggatagaagtaattgtggactccagctctgacaatttgtagatctgcatttttaaaattctaactgaagactttgctttattgtagaggacagtggtttacagctcgaattgcacagcctacaggcagatgtccatttcctctgggcaaggtttatttttatttgtttactgtacttatttgttgacaaacattgatactataaagataccctaacagcgtccacatgaaagaaaaagaaagagcaatggacacatcaaccctgaacatccagtcccaggaatcctttgaccctgccctccttgcaacccagagatatagattggatgagccctgctgagcagaacacacatgtccccaggagaaagacatggaaatgaggcccctccctgctaatgaaaagcagctcttcccctcttctcctgcaggtcctggtgaggagccacccaatatctgtgcccttcctcagtgtccacaccatcgggtctatgatgatctgggcttcacttgtcatcactctcaatattgaggttccccgttaaacagactgagtgaactgtggctgctccacgtgggggctgttctcagtctgttgcttctgtgcttgcagaggtcccctgtgaagttaattactggagtctctcagagaaatactacagaccaagaattctcagacttttctggaaaccctgtggattcactttcactgaaaacagcataagcttggtccagcaggcttcatgacaggggtgggtgtaggtgataacatcagtaattcaagtggaagttctcagtgggactctccttgagtacaaagaagattaacagtcctcagagacacgcttttcagatgattctctcttaagatgattaacctgagagctcaggaaaattccgtttattactgtgagggacacggtgaggggacatctgtgtgagctcagacacaaacctgcctgcagggagacacaaacctccctgcatggtagatgcttctcagaaccaccagggggtgcacaggaaaccagaaggtgctcaggacaccagggggtgctcagaaccaccatgactcactcaagacgccaggggcgctcagaaccaccgtggggcactcaggacaccaggggacattcagagccaccaggggtggctcaggaaacctaggggggtgctcaggacaccagggggactcaggaaactagggggtactcagaaccaccaggtggtgctcaggacaccagggagctctcagaaccatctgggggcactgaggaaaccaggggactcaaacactagggtgtgctctgaagcaccagcggaccctcaggactgcagggggcgctcaggacactagggaacactcagaaccaccaggaagcgctcagaaccaccagggggccctcaggacatcagagcgtgctgaggacctccgggggcgctcaggaccttcagagagtgatcagaacaccagagggcgctcagaacaccaggaggtgctcaggacagcaaggggctctcaggacactagggtgtgctcagtaaaccaggggtccctcacaaccaccagggggcactcaggacaccaggggatgctcaggacaccaggggccactgaggacaccaccgctcccttagcaggcagctccacatcaggcccctgggttggggcaggaagggtgttttccttttggatcttgccactaaactcttgggagtttttctccttcctttgtggtttcaagaaacattggtagattcttctcaggtataaagctctgctttcttgtattatgtaatgtttttggtttcggatgttaccagaattacactgcactgtgagaggattcattcctcgtgtgtgcaatagtgaatgaaagctgcaatgttaggggtggctttgaaagctacgttaggggtggctaagggcagttagcaggaaatgatcatcactatagaaggctactcatttctttgcacatttccataaataattgtagtttatgccctaaaaactgcatgctttcttggccctttttcttaaatgcctccaatccaagaccagtcatctaattaagctgtatgtcaaagaccaccaatcaagttaagtctgtttaatgaaacactttgtaaacaaaaaagtacatctgtgtttgtatagtcagctttaaattttacattgctttacaaatattaattttgtaaatttagtctcataattatcgtcagtatttaaaatcttaaagtcatgctatgttaaattaagtaatcttagctttctcactatgaattagagttactaagaattagaatagtaagagcatgtaataagcttttggtgaagtttataaagaaagatgaagatacgttttttgctttaaaatattttgttttccagtttacaggacctttctactggttttaagataacaatcactgtttacatctaaccctttttttaaacacctgctgtttaagattataaaattataaaattaaaaacctagttaaaaccagattgatctttgtaatttaacaagatgttcagtattgttgttttaataaaaaaaaataggtaaatacttagctactagaaaaataatcatctacttaatcataaggttttacttaggtaaacacctaaatttcatgggttataaacatggttaataggtgaaaaactttaatggacaagtattacagttttcataaatattctaggtaagctatttaaaaaataaattaggtaaatgaaataaaataaaccatttaaataaacttgttctacaatttaaaaatctaaagtttaattaaataatatatattatataaatgtttatgcattactaattgtttaaaatatatatactataaggaaaactttttaaaaatacatattataagaaaatattttttgaaaacatttgtttttagaaaaataatttatttaattcaaaggttaattataaaatgtcgtaaacatacccagttagtaagagaggtttaaagaaagttctagacatagagaagtacttttggtaagaaaggttaaaataaaaaaaaattatatgagaaggaattttgtaggataactttttatatataaaagtgactatttatgaaagaataatgtttagaataaaacaagatgttcaagtatgccataaatggttcgtgtaagtcaaaataaggtttatagaaagctaacttattaaaaaaacttcatgttatcgagttgactataattgaaagggaagaatttattatagtctttatagggatctggctttcatatgaaaatatactaacacactgaagattggttagaatgacaaaattgtcttaaagtattgatttattcaataaaattataaggtattataattttttaacccaaaattttaacttttgttgcatcttgccatttttatttttttccatttgagaaggcttgagaggatctcaactttttcatcagctcctttaacattgtttcttacttacagcagttagcctctgagttaacttctaactgttgttagtttctgactgctattatttcctgatgttaaaatcctctatcttaaagttctaaataaaatgttttctttcaatataatattcagtgtccttggcttttctttaactgtctaaatttttctatgaaaccaaaatcttcacttgtaaagacacattcttcctaggtctgattaattcaaatacttttttcattagagttgacttgcaggttatgtacatggagttccccatagggaaaaacagtcacagtgcagaaggctttatttttgctatttggtaactgggcatgagacaaattttaaatttcattgaaataattcctatgtaagtgttattaagtttttcaactacttagtaatactgagagtttaagacaatagaaattaatgttatgacattcatgtaactatctgtataacttttaaagtccttgtgctgctactttactgagctttgaatcctaggtctaaaaaggacacacaacactttgggaggctaaggtgggcaaatcacctgaggtcagaagttagagaccagcctggccaccatgacaaaaccccgtctttactaaaaaatacaaaaattagctgggcatggtggcaggtgcctgtaatcccagctacttgggagcctgaggcagagagaattgcttgaactcagggaggtggacgttgcagtgagcagatattgcactactgcactccagcctgggtgacagagtgagactccatctcagaaaaaataaataaataaaataaaaaataaaaaggacaccaagtccagctaaatcttaaacaccgacagcaattaaagccccatctacagacctggaagaaaatgacaagaaaaattgatcacactctcaagacacaagcccagaaattgaaactacttaaccaccccagccccagggactattacagaagaagtggctttgtaagattgtaaaagctaattttgagagatgaaatcagttcagagtttctttataaattaaacattaatgcaaggctagcatctgggcccctgtgccagattgaccagggtttcttgaagaattaatccacatttaaatttaaaaaacagataaaactgtataaaagatctatgcaaattatttttatggtaaaagtaattataatttaatagatttatttttcagaattgatagttttaacttttctcatgctgttcttctaaggggttatattttagaaaatcaattctactctttcaaaaatattttttttcttttttttagaaatcactgagttttcatgtggctaaataaataacttattttacaataatctgtaatcctattttgtaatatcaagtgttgtaaacttttgatatttgacaaagttcacaaaataaaattctaaattcagtcatttgaacaccctgaaaagaaacacatttagcttatttggtacagttaaattatacaggaagtaatgtcaaatttgcaatggttattaactttggactatatttatataaatgtggactatataatttgaatatacttatgtaaagagtatatgttccaaaattctattagattcaagtgatttttatatgtcttagtatcagtagtacttatgattataatttaaaatttttgtttatcacagaaataaccaaattttctcctcaattctgtctttaaccaggggtattctaaaaggtcggtcattcacaattgttgttttactttgattctttatcaggtggcttataataatctatagaactttgagtagtactcttaaatatacaatatacaattttgacaattttataaattgtgccattggtatagagagaaaaacttccatgagtctcatgagacctgaagcatttatgatgattgttaatctaatatcaagcaggacaggatgtaattgcatgaactgaatgaaaaggagactgaaataatttttataacttattctttaaagcatttgctatttacttatgttttattgttcagaatcaagaaaactttgtcttttaagctattcacagtttttaacaattttaactatactctattgagaaaaattgaaaatataatttcttcttctctacataatttctccaaaatttggaaactgtaggtattcttatatcaaaatagttatttgcataggttcgataaaaatctgctttcttccataacagagcacaattagagacaatggtcactttaccaaggctttaacttgaatgacatattttctgatttactttataaaatgaagagctgtacagctgatataagcccctttggaaaactggcattttacctttttttttttttttaacagggccctgagctgtagtaagtaaataattttgctttctgacaggcccaggaaacccaagttttcttggatacttgaaaaaataaaaagtaaaccaatccatatagctatctgatggcacagataaaatattggctgggcttgaggcttttaaagatcttacccttagattccttataaaaaatagcaaaagcaatgtatgaataaaacagcctatgtacaacaaacaacaacaaaaacaaaaacaataaaaagagagctaatatgttaagtgattatttttgctgcatcttatacaaaaaaatcaggccaagtataataagcctaaaatttattttacaaataaattagtcctattatgattttgtctccaataaaattggggaattatagggagaaatattctttcaaaataaactatagtgcatctgttattaggttctaaccttgtccacttgtttttcaatttacaatattttccacaatttggactcaattttaaaatatttctttccacaagtctccaaaataacattttcagtgattttctttttaaatatttttttcctatttgaaatctccagaaggtaaactgtgctttcttacagctagtcaacttaaactctaaaataaaataaaatcaatgatatggtttgtctctgtgttcccaccaaaatctcagtttgtatagtaataatttccacatgtcaagggtggaaggaggtgaagataattgaatcacgggacgtgttttctccatgcttttatcctattagtgagtgagttctcacaagacctgatggttatataaagggcctccctcttcacatgacacttctctctcctgcagccatgtgaagaggtacgtgtttgctgccctttccatcatgactgtaagtttcttggggcctccccagccatgtagatctgtgagacaattaaacctttttttaaataaattatccagcatcaggtatgtccttatagcagcatgaaaattgtctaataccagcaacttaattatatacaaaaattccttttataccctcctactgtgaagggaaaataaatcttgagaccccaaaattactaagctaaagagaagagtcaatgtggtgttacaggagatagaaagaaattatttaggtagatagttgggatgagagagtctctggcaaaataacttttcttctaacaaaaatcagctcagaaataacttcttctctaattacacacagttcaaagaaatcacttctaacaaaaagcagactaaataatcaggctgtgaaatatagataagcaactctgccacagagagggtgtttctgggtgtaatcaccaaacctcacatatataggatgggtcccagtaaaaacagtgagccttaataagcacattccttttcttttctgggagtacactaagatagaaaagctggaagcttgcacggggtttgcgacgccggcacctgtgaggaagtacctgggaccaggcaagaaaacccttctggcctttcttagcacatgcacggtggaagaagataagcagtgtggaggagatcaagcaaagtgcccgcctgcccaatgaaagcatgaggtggggttgccagagactttgctctatgcagatggcacacattgtcctaactgtttttgcaccctatgctgataagacaccgtctccccacgagcacatttataaaaatccttacattttactgcagcacgataacccatttgggacccctctctgtgacagacagctttttttttattttacctattaaacttgtgctctaacctcacccttagcatgtctgcgaccttgatattcacggccgtgagacaaagaagttcgggtggtattccagacaacgaggctgccatactggaaagtgctttgggcaaatctgcctccccttctgtttaaagtgattcctctgaggctaacctgagaccaatacacagctgattgcttcctcttcactatcatttatgtaaaaacgaagatccactgagtcagactaaattgtgcattcagtggtaggctaataaagtactcaaaagaacgcaacctattgtctcttatctacttctaaactgcagtccgtgcttttgattcgtcctgccttacaggaaaaatccaaagtacattttacatatattgattgatgtctcatgtctctctaaaatgtataaaagcaagctgtacttcaatcgccttgggcacatgtctcaggacttcctgaggatggtcatgggtgagttcctaactttggcaagataaacgtattagtctgttctcctgctgctaataaaacataacaaagaccgggtaattgataaaggaaagaggtttaattgactcacagtttcacatggctggggacacttcacaatcttgtcagaaaagcaagcgacatcttacacggtggcagactagagagagcttgctcagggcaactcctctttacagaaccatcagatctaatgagaagtatttactatcatgagaacagcatgggaaagacctgcccctgtgattcaattatctctcattgggtccttcccatgacacatgggaactgcaggactagaattcaaggttagatttggatggcgacacagacaaaccacattagtaaacttcctaaattgactgagacctgtctcagatatttgtcgtttacctaattcatgttcagccttcagagttccaaggcctatatcagttttccaggattgtttcccctttttgttgtttgttatttcctcctttatttatatgttttacttctcttttttctcccactattttcttattaatggatgtgaaacttcacaacatttgaaatataggtaacaatgaactataataacaacttgggacctatttatctagaaataatccgtcctacccatgaaagaaaaaaacaaaaacaaaaacagaagcccagaaacttattttgtggtaaaatgcttcctctgaaatattttggaaaggaaaaagttgggaagatatgaaatgaaaataaaaacttctgatgtcaattcattatgtcatgagggggaaaaaaactaaacgatgatccacgcaagaaactgattttcctttcattcctgagaaaatagccacagacagataaaatgttagatatcttcacagatagctacaatttgttcatctttgaaatacttagtgcaggagaaccacttgatattctatttccctatgtgcttctttttcattactacatgtaagttttcatgcaattcctccttcccctctagccagcttttcccctttatatattgaaagccctaaaaaatgtcttttgggaatggcactaaccacgcattgtttctgtgattacttttcttccaagcatgccataactttgaaaaattaattttaatttgattgagagctctctcagaaacctttggttacactaggcaaaatccaaaatcaggagccaattattgtaaaaatcagccatagtacactgtgcgtctgtgtgtgtgtgtgtgtgtgtgtgtgtgtgtgtgtgtgtacatgtgtgttttaatttttgtgagctttgagccatgtagttctctctgtggagatactatttggcgtgactttgaatagagaattctaaaagaaataagaagctcctatgagttctctgaaagtttctggactcaccatggatcttgactgtgtcattgcatcagacagtcccagggaacagactctctggtggtttcatagaatctatgcttgggctctccctgcagtttactgggtatagtaatgacaaatcactgtttcaagagacaatttcaaaagcattagatgctgctgagagaggattgtgaaccaggggactgcccctttcttcttggagagcgacattgggagaatatgctctgtgagcccaaacagcatcctcccctgcagggtgagggcagagttgcagggcaggcccagaacccactccacacagatgtcagccctggagctgctgcagaggagtctgaggagaaaatttttccagcacctgaattacacttatttcaaaacaaaaatgcaattaaaaagttaaaacaagtaattaatgtccaggcacagtggcttacacctataatcccagaaatttgagaagctgaggtgggaagatttattgaacccaggagtttgagatcagtctgtgaaaaatagtgaggcttcatctttatttttgaaaataaaaataaaataaaacataaaaaatttagcaaaaactacgatgcgtctttacataccccatcatacttgaagcatttacctaacccaatgaggtgatgaggacccaatttgaaaggagaaaattttagacttttcatatatcttaatagttggaagatgtagaagaaatatatttatatcaattaaatgtgtgcaaatattgacagacacaccataccaggagttcaacttgcaaagggtaaaaccaaaaaagtttgagattgttaatgtgccatttgaaggtgagatcgttttgaggaccatgtcctgtgagagtttgtttctctattagaggagttctgtactcataaagttctggacatgccaggagacaagtatcagtaaacaaatatcagaacttgaacttcagcttcccactcttgcattctccatgtgtcatctctctactatttctcattctagatcaggtctttagctatgaaatattccacctaattaacatgtaaatagattgaagtccacagagttaaatatgtatattttctcctgtttttcccaattgttccctcccacagctccaatattctccactgttaccatcaccttctagatctgctgccatgccctgcagattaaggatttgattccatgacagagaggaggtgcatttcaatggaactttggtgagaacctcggtttttatcccatttcctctggggctccaccagtgcatctggaataatgggttcagtggctggcccctgcagggtgattccttagttctgtagtgaagatgagggaggtgggtctgaatgcatttcagaagtatgggctctcctctctcagacagacactttgggaaaataagatttttctgactgcacccattctagaacaaaggaattcaattggataagaatgctgataaaaaaaacctcaaaccaaattaaatttaaaggagtttaattgagcaatggatgattcatgaattgggcagcccccggaatcacagcagattgaaagagacttcagtgcagccatgtggttgaagaagatttatacatttttttaaattatgtacagaaatcagaagtgaggtacagaaacagctggattggttacaggctgatgtttgtcttatttaaacacagtttgcacactcaagagtgtatgagtggttgaggtatggctgctgaaattggccaacgctcagctgttggtgaggtgctcaggtacatactcctgagttaggttttcaatctcgtccacctattcaggtaggttaccgtttgtccacaaggactcaaacatagaagtacggagtcctcctcaggccatatttaattcactttatcagtgcccttcagcatatggttcctgagaatttcacacggcaacatgtttaccaccctagaatttaagcaatccaatacatgtaataggctgtatttcacatggcaacttctgcctcagtttagctaacactatggctttgtttctctctacaagaactcatttctcccaagatttccattttcctgaaaggaaaataaatctttgggacccccatatcactaagccaaagggaaaagccaagctgaaaactgtttggggcaaacccaccttccattctttccctaaaatgatagctgttaaggtgtttacaagctacatatctccttcaaaatttgaccgcacagaaaatccttgtagaccaaggacattgtagaccaagcagagagtcacttctctgctcacgtaagtcaaatgcatatctgattgctccctttgctctattgtttcactaagccagactaaggcctatgtgactattcctgtaaactgtgcattcagttaaaggctaatcggaaactcaaataatgcaaccatttctctcatacctacctatgatctggtagctctccccccaacttcaatttgtcctgcctttttgaactaaataaatataccttacatatattaattaatgtctcatgtctccctaaattgtataaaaccaagctgtgtcccaccacactgggcacgtatcatcaggactccctgaggctgtgtcacaggcatgtccttagtcctggaaaaatgaacttcctaaatctattgagattagtctcagatactctttggtttataagtatgttttctatctcataacttcaattatctgaaatactaaaggaaatctgccaaataacacattatcttgtttatctgttattgttgttgcaaaaataaatatatttatataatttatgtataattgatcatctttgtacattaccaaactgagtagcagatttgttagtaagacccaatgtaataaaaaattcaaatatcaattaacaacttaatagaaaaacaaattacgctacatttgtttgccgaaatgctaccaatttttataaaaaaataaacacatataacataaatggtttaattctcagtatttctattgagaaaaataagccaaatacataagcgaatatactatattatttcattcttataaattctaccaaataaatactagtctaaagaaatatgaaaacatcagtagtttataaagaaatggtagaaaaagggaaggggaaaaaacaaataatataaaagatcaagaggaatgctgaggggagttgacttgttacctcattgaaaatagagattattttttcaaagtttactattgcacatgttaaatatgtgaattttatcatctgtcagttaaaactcataaaatttattacaagtaaacagccgacattttatacaaaaaagggatgataggaagaaacaaataaatacattaaatgtcagatacgccaaaaacttatctgcctgacccctagttgtctccgtaatttttggatgaaaaccagcccacccctgaccctgctgctctgggagaggagccccagccttgggattcccaagtgtttgcattcagtgatcaggactgaacacacaggactcaccagggagtttgtgctaagctgggttttccttgttgctatattaaaatgtgattcatggagaactagagagattgagtgtgagttacatgagtgagagaaacagtggatatgtttggcaatttctgacttttgtgtctctgtgtttgcaggtgtccagtgtgaggatcagctggtggagtctgggggaggcttggtacagcctggggggtccctgagaccctcctgtgcagcctctggattcgccttcagtagctatgttctgcactgggttcgccgggctccagggaagggtccggagtgggtatcagctattggtactggtggtgatacatactatgcagactccgtgatgggccgattcaccatctccagagacaacgccaagaagtccttgtatcttcaaatgaacagcctgatagctgaggacatggctgtgtattattgtgcaagagacacagtgaggggaagtcaatgtgagcccagatacaaacttccctgcaggaacgctggaggaaatcagctgcagggggcgctcaggagccactgatcagagtcagcccaagaggcaggtgcacacagaggctgatttcctgtcagggtgtgggacttcgtctttttaccatttctctagggaacctctctaagttcagaattctgtgcttaccaatgtcatctctacatgttttttaatgattattttgagaacctattcttacatgcacaaaatgcagatggatgcttacagagatgaaaagtcctcaaccatggtcaccaggatcagccttgaggaaactcaggggtgcctggtgaatcttctccagtcagactcaggacagaaacctctgtgagattccctgactagatcagtcttcaggaattttgataccagccaatagagaggctgggccagggtcagtgtcatgtagaacctcacaggtttcacgtctgacccttctccttctcctgacactaaagtatgcaaatcagtatcagcactgatctgggtccccttttgctcttaaaccattctatttctttttatttgttgttgttcttgcttttcctcgtacttctcttgctccctgtaaaatggggaggtgtttcttgctgcaaaagccccaagcctcaagcccattccctgcagctcaggcggggctcaggctgtggctcctgcagccacatgggagtggctgttggggctttctcttctcccattgctcagcaccctccagtgtgttgtgtggagactatctgggaacgaatgtggacaacaggagtgaaggggatgagcttgcgtggacagaatgggatgtggatgtgaaatttatcctgtgctgtacaaacaaccacagattcaacttcctcaccagtagtattagaaagagggtgtgaaagttgtcagaataaaaatggaaacacttgtgttaacaccctgacaaatggaactaggaatgaccatgaagaagtttctcatgcatatactccagaaaacaagaactaccgtaaatggattctgcttaaccacagccttggatagaagaaaccacaaccttacaaaaatcacttctacaaggatatcttcccagcaactccctgtttaaccctacagtgatgccacccttagtcctacaaaaatcacttctacaagaatatcttcccagcaactccctgtttaaccctacagtgatgccacccttagtcctgattctaggagcacaggataatcctctcaaaacgacttatgtaacccacctcattttcactgtgtaaacctatggattcacatcctggagtcactgctgcatttgttcttaatggtcattagcccctttcacaatatttgaggctgtttttctctgatgtctcttctaaaataaagaatttccaagtggacagcagtaaagaagctatttaggaagatgtaatgggaaggcatctttaacattctgttgaatgtttccacatggcacttcaatcccctaaaatactttgctgtatcagcatgtgatgaatcggagtataatattgaaggtaaaatgggaaatacatgggcttttgatgaatcaagtcataggatgagaatgtctgtgtccttgaggaaggagaccatgggttgtaagttctagtggaggtacctttggcaaagggagttcatgagtttctgaaccttatgctacttttaatttaaggacgcaatttatgatgtatgtttacttaaatctttccagagacatttgtcagtaaggacagggtagcatttgtgtaatagtgatgacttagagagttattttgtaattgctcctgtaaggtatgcacattgctcacttgatacagaagttcaaatgtcacaggtggaaaaacaggaataaaggtgggcagatcacaaggtaaggagatggagaccatcctggctaacacggtgaaaccccatcgctactaaaaaatacaaaaaattagccaggcatggtggcgggcacctgtagtcccagctactcaggaggctgaggcgggagaatagcgtgaacccgggaggcagagcttgcagtgagccgagatcgcaccactgaacttcagcctgggcaacagagggagactccatctcaaaaaaaaaaaaaaaaagaaaacaggaataaagcaaattttatgaactgtcatgactgtagtttttggcaaggacattatcatgtcaacctgtaaataaacagacaacaataaaacatatcaaatccatggggagtctgacctatgtccctctgtcttataagcacaaggctttgccacatccaaaatattattcaggctccagggtataaaatgcttttggactgtggaaggtaacagctctcccctcaggcaggggtaaggtatctggggaatgcagagttgtgttcataaggaagatgtcattatcgtgtcttctcctgtgcctggtagcaggtcctgaaggtgaacgtctcagatgtcagacatgggtctatcgggttaggataggtacatgtgactgacagggactgattctccatgtaatcacatgccctgtcccaggagcagctgcaggagtcagccctggacctgaatagcacacacttaccctctgcctcacctacactgttactggccactccgtcacaaccagtccttactagtggacctggatctgccggctctcagggaggggctgcaatggataaaatccattgctagtggtggtgggagtccatttgtcttgtggaaaatggcagcatttccttattttataaggcataataatgctatgttgtgtacacataccacattgtctttatccatttgcccattgacagacacttagtttccatatcttggctgttgtgaatacagctgcaataatcacaggagcgcaggtatcttcacaaggcggtaatttcatctctttgggtatatttccataagctgcatcactggtcatatggtatttctgttttaattcatttaggagccaccacactgttttgcctaatggtaatgatgagaatacagaatgtcatagccgctacgaagaacagttttagatttgaggtataatccaaaagcaaataatgtttgatcagggttctcatatgaggctctaataaataagtccagaaagttttcccatcttgggcaaggatgagtttgcccctaattgtctttgaggaagaagattggcagaacgtgagatggagtctgttggcaggattcaggattcagtaataactagtaatggcacagaaaaatagagagatagagacatacagagaaagagagagagaatatgaatctcataagaggaaaatttgctaaatatcagcattgggttttcagtcatagacacatttgtatgagccaggaaccatggagtcaagtgaggagtggagaatatgttcagtccaaaaatcagcatattctcagaggcacccattgccccatcacacaggtggagaattttggaaaccagtgaagtgcgagttcacattaggtgattaagctaccatgtttcgataaactttcattaacatgcaaagtacttccatagataactgatgcacaaatatacgagatgcctttttgcgtttatggatgtctagagaaaaataagtgagaaaatttttccaggttgcagagatctgtttaagttgcagattccataggagagtgtctttgaatgaatactgttctattaattaaataggtcaaaattccctctgttggagcagccttccaattatatagatttctttatagcttcttgagttgtgaaacataaacccaaggattgacttactggaatatgactgctgtgttgattaaatttctgataaggtttcttccaatgatttgagaatagctttcctgtttttttactcaaggaaatgaattttcacaaggtctcaggacatcacgtttcaggtgctttagttaaagagactcttcttgggggcagtcagctttcttccaaccatgagctcatttcttcagcaaaccattcgctttgtgcctctattaagaattatgaagcttttgtacttcaatgcactgaaaatcatgccccttgaattaaatgttgattggcactgacatgaattggccactcttgtatatgtgtcctatgttatgggctcaacataacagtggactgagaatcgtccattagctgcctctgattgtggcactgaccagattgagaatcctcagagtcatccatgaaaaagagagtccttaggttcatgaggttcttggagacattcaggtaagtggaggagagaaacaggattgggggctgccagccatttcaacaagactgggaacaattatcatctatgtttaaaggtctacatcattccaaacaccctccaggtttctctgagttcattgtgatgattacattcagctgcttctccagtgagtttaaatgagcatgtggcaattcagatgagcctggctgtggggtttattatatgtaaatctgaactacataaacaaagagggcatgtctgaccgtatgagggtgcaaaatcctggagaccccacaccccacactcttgtgctttcttttctccagcaacctccaggtttttttgtatgagaattgtaatagattatctcatggctaagtcatcaagagacgtaaactctgagaaatacaagcagaaaattctccagatagaagatccaggggaagaacatttctagcaccttatctatgtaggggaaggcagtccatctccattacagacccctcacagcagccttcctttataaggaaaatgggtcaaattagccaatagggtaagaatcctataatgttccagccagaaaagggaaagcatcaatttgacttctggagactctgtatataggtcacattccatagaaagaagagcactaaattattaagattcaattgtaactacatatgatacttccgggatgcacaaattaaagatgaaagtgtgacaatgcacaggctctgtcagagaaggagaacgtagggaaactgaaagagaatggcagagagtaagacaaggacagaagagcaatatgaagcctctgacatcaactctgtaaggacaaggtcttggcaactcccgcattgaccacagattctgttaccatgggccatttgcagggttcctagctaaggaaaaagaaaaaaaaaactgcatgcacttcccaagtctccacttgtatcctgtttttcttagatctctaggacaaaaaaaatggcataaacctagacctagtgtcagtgtaggaggtactttctttataggcaagacactaggaagaagggaaaatgtgtgttattggactaggagatacagagatggctttaatctgaatagatctacacccgcaggtattctcgaatgcaacattcaactacaagagcctaatgaagaaacacgaccctccccaaacccctgcaagctcttgtattcactgtgtctccactgatttagtgcacctggagcttcagagcactggctccctcctgtgtcctagaatcttttctttgggtctttctgcagaattcaataggattagttaggctaatcaattgtttcaagagatggtgttggcagcatatattgtcgctggaagagtattctaagccaggacacaggcactttatgccggactaaagactctggagaaaatgttttgtgagccctgacagaaacctccttgaaaggtaagggctgggcaggagggggcactgaggagccacgcagcacacggtccagccctagaacaggaggctggggaggaggtttcctctcagggcctcggttttccttcgtcagaaaaaaaaaaatctaaaataaccgttcaacaagttgctgatatgccttcaaatatcctgctacaatggaacaattcatataacttcaggcaatgagaactattttttaaattgggcttctaggattataagtatcttaatagtgaaaatgtgaagaataggtatgattttactatttcaatggatacagaattgtgggagtcactatattcctatgaacaaaaaattcagatttcagtgttaagtaatgttgcctacattgtgtgagtgacggggcagtggtggatccgagagtgtggtgggtgcacggacataatgattcagaaagcaatatggaaagatgagtatctatggatacgaactgaaagtatgtaaatacttcacaaaatactaataaacggagttgaatataaaacccataattatccaaaacacaaatttcttggaagttattttgggaacatgatttcttaaagaactccaaactcttgtttcaacttctgactcctcgtttctgtgatataagaaaaccatttccaattatgcatctcagggcaattctgtaaacccagagcgtttctgctgaagatcctggggaatcaagacaccgggcaggtgatggagacactgtctcaggtgcgcccaacgaatctcagaggaacctgctggagagtcacgtggaacatctacagtcagtttctcagagtcaacagtgagctgtgttggtgcctgaggggaccatgatggggccaaggcacgtgcccagtgtcgtggacagtgatggtccagaaatgatctagatggtcttgacgctaatgaaatatgggttcagagtgaggagcataatctgtggggacttgttcttcagtgaaaggatcctgtccgcaaacagaaatggagcaggacatgcatttcttcaagcaggattagggcttggaccatcagcatcccactcctgtgtggcagatgggacatctatcttctttctcaacctcgatcaggctttgaggtatgaaataatctgtctcatgaatatgcaaataaccttagatctactgaggtaaatatggatacatctgggccctgaaagcatcatccaacaaccacatcccttctctacagaagcctctgagaggaaagttcttcaccatggactggacctggagggtcttctgcttgctggctgtagctccaggtaaagggccaactggttccagggctgaggaagggattttttccagtttagaggactgtcattctctactgtgtcctctccgcaggtgctcactcccaggtgcagctggtgcagtctggggctgaggtgaagaagcctggggcctcagtgaaggtttcctgcaaggcatctggatacaccttcaccagctactatatgcactgggtgcgacaggcccctggacaagggcttgagtggatgggaataatcaaccctagtggtggtagcacaagctacgcacagaagttccagggcagagtcaccatgaccagggacacgtccacgagcacagtctacatggagctgagcagcctgagatctgaggacacggccgtgtattactgtgcgagagacacagtgtgagaaaccacatcctcagagtgtcagaaaccctgagggaggagtcagctgtgctgagctgagaaaatgacaggggttattcagtttaagactgtttagaaaacgggttatatatttgagaacaaagaacaatagaaacacaatctaattgtaagagaaatattccattcaagagccaccacataagccaaactgacagagtgggaaaggccacactcagtaaagttgatacaaacataccataaaggtgctactatgaacaagtttttgaattagatgaataaatcatttggagcaaggttatttggtcatatgttaagagtaagcatgattcttacaaagtgggaaaattgtctttcaaatgtttctgtcacttcttaccataaagttcattttagaggttttaggattacagtgaaattgcacagaaggtgtgagaattcccatgaatccctgccccgcacggacaccgcctcctccactacagccatcctgccccacagtcacaaataagtcacaatggatgaatctacaagaactcttggttctttctttttctggtgatcccctaatataacaagcctaaattatcttggaacacccaggtattttcaatggctttctagaagtgatattagtcagagggaaagtgagtgaggctattactatttgagcactttcttccaaaatccacaaaatatatgttaatttggagtttttctaacttctggtttacaatgtcccttcccagagagtaagatttttaagcttttagtgaggctggaaaaaaaaatttttaaaaaagagaaataagctttcctgtattaggctgacttatcccagcggcagcaacaagcacagcccagacccaggaaaagtcttaataatattatctaatgtgctctggagactctttcagcactccctcaacatagggagaagaaaaacaaattttcctttgtcttatgatatgagtttatagagtcttgttctctgtaactagtaacttcaagtattctgttttatctaagaagcacaacgaaggtcatgagaagcctagcaggccagaactacagctgtctaggtaccggagtgagtgttatgagatcaaccagtgcaaggctctttagaacaaaacctagataacagacatctgggttgcatagcaatggtcatgtgtaatcctgagttatgaacctgttacaatttgattaactgtctctgtcctgcctccgtatccctgcttttgtgcactctaagcttgcttcaagctagcccaccccattttgggaagtgtgtataaaagtcaagcgctctctttgttctgtgcccagtctttggtcattgagtctgctgggtctgggtgtactcagtaataaaaatatcctcctgtatacaccccaagatctctctctggtcctccggattctgcaacatttcaggcagattcacatctctaaaaggccagcaagttctggtcaatcccataatgaaaatcctttaatgagacttggcacacgtgacaataagagactccttgtataatgccctagagttggattagacacactgtgagctcttgggtggtggttctgaataaggcagtttgtgcagcaaatgcaaacacatgcatgggatccaggcaggaacaaaagcttccctttacaaagtgggtgggcatctggagggagccctcagaggtgggcagtggtcgtccttgctgactgcacattagccagaggcgtgaccataattggtcttgcagggaaagagcaccactgaggtcataggttatgaaaatgtttgtcatcctccagtgagcaagtccatcctgcttgcttgtgggtgtcaactccatggtggatacactctgggagatgacaagatgcacacaaacctcctctcactaattatccactaccacacactcaagaccaacctttgctccagaaaggaatacgtgtctgtggaaatagacagagcttaagtattttgtaacctggtgaacatactgtgcaaaaccaaacgtttcaggaagattagctcagaaatgtttatcaagtgactgaagggcagtggcgggtgaggtgatgggacagcctcagggctgcacatgaggagggctccctcccccatgcaggcttttcctccaggagctgcaccaggaactcaaggaagatcagggagaattctgagaacaccctgctgtggagctgcctagagaagaagaataaatgatgaaaaatacaactctgagtaatgcatgggtttttgttcatgaaaactctctctctgaaagcttgtgaaggtcttgaaatacccctgattagctgaagacaaacatttaaaccctccttccacagggagttcaagcaggctggatgtgtccttctatggatgatcttcctcagccccttcctcttcccagctcatccctggctctctgtgtaaaaagttctcatcagcggaatgtggttgatgaagtgacgtcttcaatttcctcatcttctatgtggtcatgttattttcctcatctgaagtttaaaaactcacctgcatgcagcacatgacaggctaaaatctcttgtggacaaaacagtaacaaaggcacccaccatggttgagcacccgtgttgctgacaacgaccaccaggggtcaacgtcctcttcacaatcctgtgtcagagcagcacttgagtgatttcaataacaacttcccaggagaatcagctgaaaactacttgtcccattttccatacagatataacccctctattttcctgaagaaatagaaagagctgaatgctgaatacactgaatgtctgctggttttgcaagtttgtgactatatcactttctaatttctgacctgtgcagaccactgtacagacttttctcactggtgggaccaggcttccagatgtcaaatataaatgagcttcttcatataaaagtcaacacaagctcctcatggtttcagtgctcactgaatggagttggaaataaaacccacaattatccataacacaaattccttggaagttattttgggataatgagttcataacctgtagaccaagagtccaagagtgtttctattgaagagcctgggggatcaagacaccaggcaggtgatgcagacactgtctaaagagtgcccagcggctctcagagggacctactggatactcacgtgggacatcagcaatcactttctcagagtcaccagtgagctgtgctggttcctgaagggtccaggatagggccaaggcacctgctctgtgtcggggagagtgattgttccagaaatcatagaggtggtctctatgcttataaaatctatgttcacagtgagaagtctgttctgagagggcttattcttcagtgaaaggacctctgcccacaaatgttcataaatggagcagggcattcatttcctcaagcaggatcagggcttgagtcatcagcatctcactcttgcaaggctgatgtgtcgtttgtcttccctttcttatcatcgaccaggctttgagctatgaaatgccctgtctcatcaatatgcaaataacctgagatcgactgaggtaaatatggatatgtctgtgccctgagagcatcacccaacaaccacatccctcctctagagaatcccctgaaagcacagctcctcaccatggactggacctggagaatcctcttcttggtggcagcagccacaggtaaggggctcccaagtcccagtgatgaggaggggattgagtccagtcaaggtggcttttatccactcctgtgtcccctccacagatgcctactcccagatgcagctggtgcagtctggggctgaggtgaagaagactgggtcctcagtgaaggtttcctgcaaggcttccggatacaccttcacctaccgctacctgcactgggtgcgacaggcccccggacaagcgcttgagtggatgggatggatcacacctttcaatggtaacaccaactacgcacagaaattccaggacagagtcaccattaccagggacaggtctatgagcacagcctacatggagctgagcagcctgagatctgaggacacagccatgtattactgtgcaagatacacagtgtgaaaacccacatcctgagaccgtcagaaaccccaaggaggaggcagcttcactgaatgaggaggttacagggcttacgatgtttaaagttgttcagaaaataggctaagcaattgaggaatatgagtaatagaaatatgtacgcactctatacaggaaatatttctaataactgtcaccctatatgcaaaattcgcagagaggtaaaagcagaaatcagtcaagctgatgcaaagttccccacgtaggctttgtgcagatgtaagttctaaaatcagatagataaataatttggagcaagattgcttgataacatggctaatgctgaatatgattcctaaaaactggccaaaatatattccaatttgtctctgccacctctcttacataaaatgtattaaaaagtagttttaagaccacagcaaaattgaacagaaggtgcagagatttcctatgtgcccctgcttcacacatgcacagccttccccactgtcaccatcctgccccagagtcatcaataagttacaatggatgaacttacatggatggattggttctttcctcttccggcggtcccttggcataccaagtctaaactatcttgaagcacaacaggttcttcgagtgggttcctgggaatgaagccagttagaggaaaagtgggtggggctattcctattaggagtcttttttagaagactcataaaatgtatatgttcctatagattctgtgactcctgacttagtatcccttcccagacggtaagcttcctaaatgtttagaggcagatccatatctatggaaagaaagcaagttctagtgaatcccataaggaatgtcctttaatgagaagtggagaccttggtcatgaggcacatcatgtatgattttctataattcctttagattcactgtaagcttttgagggtgtttctggatgaggccctttgtacagaaaatgaaaactcaggcatgagttccaggcacaaccaaccaacttccttccaaagtgggagggaatagaagaaaccctctcctgtgtgggcgctggtccccctccattgctggctgcacattagccagaggcatgagcccaattagtcttggagggtgacagccccactggggttgctggctatagaaatgcctgtcctcttccagctgagtgagtcaacctgctcgcttgttggagtcaactgcatggcaggtgcactctggaagatgacaagatgcacacaaaccttctgtaaagtatcaattactacacactcaaaaccaaactgtattccagagacaggtgtctgcagggataaacagaatttaagcattttttgaatagggaagacactgccaaatgccatatgtttcaggaagtttaactcagaaatgttgatgacataactcagaaacgtgaggtgacatgacagcttcaggggctgcacatgaggagggctcacttccccatgcaggcttttcttccaggaactctaccaggaactcacagaagatgagggagattctgaaaacatcattctgtggtgctgcccagggaggaaaaataagatatgggaaaaaaaactatataaattattagatttgttaatacaaactatttctgaagccttgtggaggtcctgacataagccatcattagctgtgaacaaatatctacaccctcctttcctggggagttcagttaggttgcgtctcttcttttatggacagtatcccccaacccctttatttcctgcacacctgctgctctccatgggacgagttctcatcagtgaaatgtggttgatgtagtgaggtcttcacttttctcattgtattagtcaggattatctagagggagaactaacaggatagaggtctgtatttgacggggagtttttaaggaggactgactcacacgatcacaagatgaagtctcatgataggccgtctgcaagctgaggagcaaggaagccagtccaagtcccaaaacctcgaaagtcaggaagacgacggtgcagccttcggtctgtcgccaaaggacagagagcccctggcaacccgctggcttaagtccaagagtgaaaaagctgaagaacttggcgtctgatgttcgagggcaggaagcatccagcatgggagaaagatggaggctggaagactcaacaagtctagtctctccaatttctcctacctgcttcattctagccatgctggcagctcattagatggtgcccagggaggttgaggttgggtctgcctcacccagtctactgactcaaatgttaatcttctttggcaataccctcacagacacactcaggaacaattctttgcatctttcagtgcaatcaagctgacactcagtattaaacatcacactcatcttctgtgttgtcatgttcctctcttcatctgaggttaaggaactcaccagcatgtagcacatcgtagcttaatgtctctcatggacaaaatagtggcaaggcacccactagggttaagcatcctgtgtcgccgacagcaaccaccacaggaccaagtctctctaccatcctgtgtcagggcatcgcctcagtgattgtattggcaacttccctcgagagtcatcttaaaaacggcttgtctcatttcccacgaaggtatagcccatccattttctcttcctagcaaaatggaaaaggatgaatacacggaatgtctcctggtcttgcaacttggtgactttattcctttctaatttctgatcaatgcagcccactctacaattttttttttcactgaaatgacccacattctggatgttaaatataattgaacttcctcatttataattcagaacaagtacctcagagtttctgtcctcatgcaccactctaaacttacacaagttgtttatttatttgtttcattttctggcatctctactgggggtcttcatcatacccattttatgttatttctacaaatgatttttaaaatttataggtacttaattaaatattcaggaaacaagagaataaaatgaatgtaaaataaaataaaagtaaataaattaatatttaaaataaagaagccagcagctgaaagcaaggaaaatctattatgctgggtcagagagtatggagaactcatagtacaatatcttctgcacgttaatcattacttctactcaagttacagggtcctctctctttatatcagagctttccctaacatgtgcaatgaagactgaacacagattcctccctcaagactgacctagcatctctcactgagcctgagctgacaagtcatagatatcacatttgtctaagaaaataatgacaccctgtaaagttacctaccagcgatatggagacaatttgaataatataaataaagcctaaacttgataggtagtcatttatccttagaaggattgactgctgtctctacatgtgttttttatcacagagaagctactagtgccacagtccaagttgctgaatattttatttcctagcatgagttactacagaatgtgttcaacatgaaagaatgcagctgttgttaagggagaggagatgtgattatggaacacgagcagggatccagcagacattcctctttcacgtttgccccccaacagagacaccagtaaaacgatgaaatgattgactttagtctccacagtctaatgtgagatttataccagatgttttctgccactgttttatagtagaaaatataatctctaaagaaattccatttttagagacaataccatcctccaggaagctgcaaatgcccataacagagagtattatagtgccttgtggccaggagctacaacacctgggtttggaaactaatggacagaaatatcaggttttcttgccaaatctatgatgaaaatttggagaatgtttctttccatctccataacaatatgttgtgatggagtggaggtcctggtacataagaaggtatgtgttcgcagtgggtacagaattagacccataaaatgattgttctactggggttcccttgttgttggaccagctgaccaagaaagtgttgtaagaggtgtagtatttagtgaatactgtcatatttttgaaggtaccatatttgaagctaccaggagaaacagagatacatcaatctagcctagggagactctatgaatttattttatttccttcaaaatgaggtaaaaaattgcatcagttgaaatgccgatgataatcaagtgatgaaagacaacatccactcagtgttttaggtgtggtttaacccaaaagttatacaatatgtgagaacctgaactctggagccctggccatctctcagaagaatctagaaggtagactgacctctcccacagtgtgatgtccatggagactggggatggctactgtctcaatcttgggatcccggaatagtcttaatatgattctgtgtgtatgtggatcattgtgtgtaagtgggaggattccaataactgtgtctgtgtgtttgtgagtgtctatgtttctgtgtgtgagcttgtgtgtctttgttttatattaaaatgagtaatttagtttctgatcattagactgtgtctttgagggagtgtgtgggagaatgtgcatgcctgtgtctgtgagttagtttgtaaaagggtatgttatattgaatgtgtgtgtctgggtccttcagtatttgagcctattaatttacatgaacatgaattttttgaaggtgtgtaagtataaaacttttgtaaatgtaattgtttgaatgctagtgtgtgcagagctatttgagtgtgaatgtgttacttgtattacttagtgagtgtgtgcccctatgtgagtttgtttgggtgagtcattacctatgactctacatatgaaggtgttgagggtgtgtgtgagtctgtgagcatgttttcattacctatgactctacatatgaaggtgttgagggtgtgtgtgagtctgtgagcatgtttatgtgcatgtgaaatgttgttatgtatgctttgaaagacttgtctcttgacctcaatatcatttgtctgaaaataccaggtatgtttaagcccttagaatctaaggaatagtttgttgtttaggataaatcctcaataagattaacaactgatttctcaccaaaaatcaggaaggccaaagctcactggagtggcatatcaaaagtgctaaaatacactatcaatcaaaaattccatactagcaagaacaccttcaaaagtgaaggagaaatcaagataatagaaataaacaaaagctatggagtccatcaaaaccacaaattcctaatgagaaatactaaatagagtcctgcaggctccaatgaaaacagagtggagaatatttaaaaatcttacacctaaaagaacaacaacaacaagtatcccagtaatcacatttgtgtaatgaaaaccaatattgttttatttttgccttgagtctcatgttctattccttttttaaaaaaaaaatagatataatagtaatgacaaatttgaataatgtgcctataatttatggttataaaattcattataaatttgaataatgtgcatataatttataatgtatgaatatgtaacaacacaataagtgaaaatggatacagctgtagagaagcagagttgtatgcactattgaactaaggcaatcataatttaaactactctgttataaatctgaattaccaattgtaatatccaggttagctataaaaacttaagtaaaagtaaaaaaaaaaaaaaattagcaggacagctgactaaacgtgcctgacactcttcaaccccacatgaaataaccacagaaatgaataaacagctgagactagagaaattcaacagagttagatatcatactaaataataaagcaaaaagcttacagctgaagaatttaatgaataaaataaaaatgcagtttacagattcaataacagaaaataacgagcaaaaataagaatttctgagcttgaagacaagtctttcaaaataattccagcagaccaaaaagaaaaaaaaagagaatgaaagagagaaggaaggaaggaaggaaggaaggaaggaaggaaggaaggaaggaaggaagataaaattttaaaaacatagaaaccctatagttttcaaaacacaatttgaaaacaagtttttgagttatggaaaatccaggggaaaattccagagggaaaaaaatgaaaatgatgtaggaaacatatttaataaaacaagagcagaaaacgtcccatatcatgggagatagatggttattcagatccaggaaactcaaatattccaaacagactgaaactaaacagatcctctctgaagaatgctttcctcaaattatcaaaagacaaagatagagcatgatagagtaggatagtatattcaaaatattgaaataaaaaagtatccagccaataatataatacctagaaacattattattcacaaactaacaaatatataatgtttatcggactaacatgaacaggaaatccatcacctccaggctggccttacaagaaatgctcaagattcttacatctggaagagaaaacataatagccacaattatgaaaaaattttaaaaaaccataaaacccactagtaaagccaatacacaaaaaagaaaataaatgaatcaaatcttatcactacaaaaattacaaaactacaaaaataaccaataggttaagaataagaaacaagagatacacaaaacaatgagaaaagaatcaatgaaagtgaaagaagtaagacctcttctatctattattagcttgaaagtaagtggattaaattttacatttaaaatacatagactgagttgaagagaaaagaaaagaaaaaaagaaacaaacaaacaaaagtgccaactataggctgctatgttaagcccattttgcattgttataaagaagtacctgagtctggacaatttactttaaaaacaaaaacagtctacaaattcaatgcaattcccatcaaaatatcaccatcattcttcacagaactagaattcatatggaaccaaaaaagacttggataggcaaagcaagactaagcaaaaagaacaaatccggaggcatcacattacctgaattcaaactatactatagggccacagtcaccaaaacagcatggtactggtataaaaataagcacatagatcagtggaaaagaatagagaacccagaaataatgccaaatattatatcaatgaatctttaacaatgcaaacaaaaacataaggtggggtatggagaccatattcaacaaatggtgctgggataattggcaagccatatgtagaagaactatatcctcatctctcaccttatacaaaaatcaactcgagatggattaaggacttaaatctgagagatgaaaacataaaaattctagaagataacatctgaaaaactcttctcaatattggcttaagcaaagtcttcataaccaagaaccaaaagcaaatgcaacaaaaacaatgataaataggtaggacttgattaaactaaaaagtttctgcacagcaaaataaacaatcagcagtgtaaaaagacaatctatagagtgggagaaaatcttcacaatctatacatccaacaaaggactaatatctagaatctacgaggaactcaaacaaattagccacaaccaccaaaaccaccaccaaaaacaattccataaaacaataagctaacgacataaacagaccatcctcaaaataagatatacaaatggcaaataaacatgaaaaaaatgctcaacatcactaatgattagggaaatgcaaatcaaaaccacaatggagatgcaagtcaataccacattactcctgcaagaatagtcataatcaaaaaataaaaaaatagatgttggtgatgatgcagtgaaaagggaacactggcgggaatgtaatctagtacaaacaccatggaaaacagtgtggagattccttaaagaaaaaaaggagaacaaatatttcatccaggagtcccattactgggatctacccagaggaagtcaccatacaaaaaagatacttgcacatgcacatgaatgttcacaggagcacaattcgcaggtgcaataatatggaacgggcccaaatgcccatcagtcaatgggtggataaagaaattgtgatacacacacacacacgcacaccattatatatatatataattttttttttttttttttttttttggggagacggagtctcgctctgtcgcccaggccggactgcggactgcagtggcgcaatctcggctcactgaaagctctgcttcccgggttcacgccattctcctgcctcagcctcccgagtagctgggactacaggcgcccgccaccgcgcccggctaattttttgtatttttagtagagacggggtttcaccttgttagccaggatggtctcgatctcctgacctcgtgatccacccgcctcggcctcccaaagtgctgggattacaggcgtgagccaccgcgcccggccatatatatataattttatattttctatatatacatattttttatatatgtacatatatacgtgtatatgtgtatatatgtatatatttaccatggaatattaagccataaaaaggaacaaaataatgacagtcacagcaacctggagggaattggagaccattattctaagtgaagtagctcagaagtgggaaactaaacattatatgttctcactcatacgtgggaaataagctatgaggatgcaaaggcataagaatgatacaatagactttggggacttggaatagatgaggggggctgagggataaaagactacaaattgggtacagtgtatactgttggggtgatgggtgcgccaaaatctcataaatcatcaccaaagaaattactcatgtaaccaaaccctacctcttcccccaaaacctatggaaataaaaataaaattatgtaaagtaaaataaaataaaggtatatttggctgacagttctgcaggctgtacaagaagcatagtactggcatctgcttctgtcgatggcctcaggaagttttcaattgtggcagaaggtgaaaaaggagcacgtatgtcaatggcgatagaagagaagaaaaggcagaaaattaaggttgttgggtgggtgccatgctccttaaacagccaggtatcatgtgaacgaatagaatgagaacacactcattaccacgtgaagggcatcaaggcttttatgagagatccgtgttcacgacccaaaaacctccctctaggtcctacctccaacaccggagataacattgcaacatgagatctgaagtgaacaagcatccaaactatatcagttacctacaaaaaactcactccaattgtaatgatgcacttacgttgaatatgaaggtatggaaaaagttatgtaatgcaaataaaaactaacttcacctggagtagctatacttgtagtggataaaccagactttaagttaaaagctgtaaagacagacaaagaaggacactatgtataaataaagagttcaacccaggaagaaggcataagaattttaaagatatatacccaacgatacagtacccaggtatgcagagcaaatgttatcagatctaaaaggatagacaccaatacaataattgctggcgacttcaatccctcactgaaagcattgcacagtttatccaaagagaaaatgaacagaaaatttcagattaaaattgcaccagaggccaggcacaataactcacatctgtaattcccgcactttgggaggctaaggcaggtggattggtagagagctcaggagtttgagactagcctgggtagcatggcaaaaccctgtctctacaaaaaaaataaataaataaaaaataaaaaacagccagtgtggtagcatgtgcctaaagatccagctacccaggaggctgaggtgggaaaatcaccagaacccagggagatagaggctccatagagccctgatggcacccatgcacgccctcctgggcaacagagcgagactgtatctcaaaaacaataattgcaccacagactgaacggactcaacagacacttacagaacacttcgccaaacagcagcagattgcacattctttttaacagcacaatgaacatcctccagaatttaatatatttggacacaaaaaagtctcgaaattataaaaatatcaaagccatatcaagtatcatttccaaacacaatgaaataaactagaaaccctagaggatggaatatttgaaacaatgcaaatatatgaaaattaaacaacatgcttctgtgtgaccattggataaaggaataacttaaaatgaaactttaaaaatttattgaaataaataaaaatagaaatacaatatagcaaaagctactggttacagctaaagcaatattaagagaaaagtttctagcaataaacacctaaatcaaaaaagtagaacgatttctcaaaaaccacccacctatgtgtcttaagaactagagaagcaagaacaaacagaattcataattgtagaaaaaatagacagtaaatatcagagcagaattttaaaatacagaaaaaaaattctataaaggatcagcaaggccgggcgcggtgactcatgactgtaatcccagctttttgggaggccgaggggggcggatcatgaggtcaggtgattgagaccatcttggccaacatggtgaaaccccgtctctaccaaaatacaaaaaattagccaggcgtggtggcacacgcctatattcccagctacttgggaggctgaggcaggggaatccctcgaatctgggaggccgaggttgcagtgagccgagatcgcgccactgtactccagcctggcaacagaacaagactccatctccaaaaataaataagtaataacaaaagggatcagcaaaacagttgttttcttgaaaatgtaaaaaagcaagaaggcattatctagattaactacaaatgaaaagagaaaatgcccatatacatacaatcagaaatgaaaaaagagacatcacaatgataccacaaaaatacaaaagatcattagagggtattatgaacaactatatgctagagaaaattcaagaacctagaggaaatggataaattcatgaacacatgcaaactaccaagactgaaccaagaagaagtagaaagcctaaacagaacaatgaataacaggagataataataatgaaaagtctcccatcacagaaatgttcaggacctgatggtttcacagttgtgttctacttaacttaaaaaaaaatcatgaaaacagattattgttaaactattcaaaaaattgaagaaaaattatttaattataattttaatattatttttaaaatttcaacttttatttcaggtacagggggtacatatgcaagtttttttacatgggcatattgtgtgatgctgaggtttggggtatggatcccctcacccagggagttagcataatacccaatagtcagtctttcaacccatgcacctctctctccctccccactccagcagttcacagtgcctattgtttccatggtcatgtccacatgtgctcaacctttagcactcactttcaagtgagaacatgtgatattttgtttcctttttctgtgttaacttgtttacgactatgacctccagctgcatccatgttgctgcaaaggacatgattttgtttcttttgtgacagagtctcactctctcaccaggcaggagtgcagtgacgcgatctcagcttactgcaacctctaagtccctggttcaagtgattctcctgcctcagcctcccgggtagctgggattacaggcatgtgccactatgcccagctaaattttgtatttttagcagagagggggtttcactatattggccaggatgatcttgatctcctgacctcatgatctgtctgcctcagcctcccaaagtgctgggattataggtgtgagccaccacacttttttttatgaatgtgtggtattttatgattttatattgcatacataccattttattcatctaatacatcattgattggcacctagattgattccatatctttgcggttgtgaatagtgtggcaagaggcatgagtgcatgtgcattttttggtagaatgatttattttactttggctatatacctaatgatgggattgctgggtcaaacagtagctctgtttcaagttctttgagaattctctaaactgctttgcacagtgctgaactaatttacatttccaccacccatgtatgtgttcccttttcttcacttcccacccagcagctgttttttgtttaacttttttcatattagctattatgactggtctgagatggtatttcattgttgtttttatttgcatttctctgataattaatgatgttggaaatttttttcatgtctgttggccactgagattgacaggcttacaagtgtcttagtccagcagttttcggtaacaggctatccactttcattttctcttcctcacatgccccatttctgggttgtccatcccaaccaacagttactgctggagctgaatccactagcccgcttccatgggctgtcaggaacacattgcaagggtgacacacacgatgatccatctctgcagagccaactctccttctccagagattcatccaagaaacaattttgactatacctgagctctgtgacatctgaggacatggtttgtattactgtgcaagacaaacagtgagaggaagtcaatgtgagtccagacataaaccttcctgctgagaacaatggaaagcttttcttctaagataaggaataagaaaagaatgcccagtcttaataattctaatcagcatattgatgatagttttaaccatagaaatttgagaaagaaaaaaatagtaaaaggcatacaaattgaggggaataagttaaattgtttctgtttacagacaatataactttataaattccaaaaaaataaaaaattctgaaaaaacagccactgaaaactaacaaacaaatttagtaacattgcagtatacaaaatttatatggaaaactcagtagtgttactaaaaactaaaaattaactatttaaaaatcataagacaatgtcagttgcatttacaataatattaaataacttacttagtggccatgcacagtagtttacacctgtaattcttgtactttgggaggtaggggagaatcacttgaggctaggagtttgagaccagcctgggcaacacagcaagaccaatatctatttctaaaaatcacttagaaaaaatgttggtcaaataagtgaaaatctgtgcattgaagactatatgacattgatgaaataaataaatctatatgcaaatatatgggaaactattccatattcacagattgaagataataatactgttaacatgtctatactacccaaagcaatctacagatccaaagcaatttctatacaaatgacattttcaacaaactactttttaaatgataaaattgaatcacaaaagaccccagatgtccaaagtaaccttgaatacaaacatcaaagcggggggaggtttcctagtacctgaactgcaaatatgctatgaaactacaataataaaactgcatgctgctgactttctaaataaactttaatattctgaattgaagttatttgacaatttcttctatcattttatctttactaaagtgttgcatgagtgtttatctagacagataatgtgcaaagagtcttcctgggtggtaaaatcccataagcgtctccaggagctccgagctctctctaggcttctcagtatgttcaggttcaagagacagaaagaattctctcagcccttcactgctttttgccctcttgacggtcagaagtccagaacatgctttgtggggacataatagaggggaccaaaatagacactttcagcaaacccactataacaagttctgctgcccatgggcatcttctccaggtacatgttggtcgccagaccctcaggctcacctacaccatgtggaggaggacctctacccacactcatttcagcacaactaccgtgtagctcagcatcagtaggtcacactacaatacattaaacatcactcagctaattacttattgaggttttcatttgtccatatgctatcaatattgggcagtttcaaatgacaacctagaggacttaatgatagttaaatttatgtcttctattacggaaaaacatcccttacctaatgacaggttcagctgtttttgccaagatggtgctcttccctggcctgctagtctcctacatgagaagcatcaatgaactgggcagcaccacacacttgtcaagtgatcactgggaatgatgtcagctacagaggatggggtagggttgctcatacctatgctccttacttctaggacacatcaggtgtctatggatttagagcatgtctgcaccctggtggactgcacactttacccagggagaaaggtctctgagtgtgggtggcaagccacctaggtgccaaggtaagagaccgagggcacaagctgttccagtataataaaatatataaaataagaatagttatactagatatagatcatagatatgattatatatgaatatcattaatcattagtttatagcaattactctttatcccaatgttattaataatcctcgctctataatcataacctaggaaaaaccaagccatacagagataggagtggaagggacatggtgagaagtgaccagaagacaagactgcgagccttctgttatgcccggacatggccaccagagggctccttggtctagcggtaacaccagcttctgggaagatgcccgttgccaagcagaccgtggtctagcggtagcgtcagtgtcaaggaaaaacacccgctacttagcagaccaggacagggagtctccctttccccaggggagtttagagaagactctcctcctccacctcttgtgtaggggatcagtcaggcccacccgagttatctggaggcctaatcatctccctctgatgctgtgcttcagtggtcactctcctagtctgctatcatgttccatcctgtatacctggctctgccttttagataacagtagcaaaattagtgacagtactaaaagtctctgatatgcagaaataatggcgtaagctgtctgtctctctccctctctctctctctctgcctcagctgtcaggcaggaaaggacccctgtccagtggacacgtgacccacttgaccttacctatctcattggagatgactcacactctttaccctgccccttttggtttgtgtccaataaatatcagtgcagccagacattcggggccactaccggtctccatgtcttggtggtagtggtcccctgggcccagctgtcttttatctctttgtcttgtgtctttatttctacaatctctcatctccacacacagggagaaaaacccaccgaccctgtggggctcgtccctacatctgagcttctcaatggaggtctacttctctatgagactagcaccttctgtggagtctcatgctgaatgtctccttcttgattatggtcatcggttatgcagtgctgtaattagaaacccttacagaataacctacaaaacaagaatgatactaccttctacagacatgacaattctacctaatgtgcacaactggacctattgacatcttagccaggagaggatgcaggcataaagcagatgattttccgattgttccaccctaccgggttatattgaacagtggacacaggattcaacaggtaccgattattaatccagtgaggaaattatagaatagtcccaagtctaggcagagaagagtagctgaagacagtactttccctgcagctctgagattcactaaaatgtccagctctgtccctcactcgtgaatatcacagactaaaggacacccttcccacagcattggctctccatgaagatttgaaattgatgcccaggcctcagggtctgctgacagagctgtgacagtgggagtggaactcacacagagcaaaacagagtgtgttgcataataaggctgtacaacattttcataatggagggaatctcttggtcccaggaagatgacaatttaatatgtctcaggcctgtggcgctctctttaggagctttgtgtgtggcttctttgtatactctggctccaggaactccagtgagggaagagattcgtcacctcctgtgcgaagggggctgaagcgaggaagacaagtggcctggcttccacagaacccataagctaaaacactccgagttcccttgactgcaagaaatgcagctgtcatcacggtttcaagtgccagagtctttaatgattatgtttcaactcatgagagtgccaggaaaattccaccagtatgaactactcaaatatgtcattttgtaacattacttcattgcttgctctcatatcctccatgtttctgaaaaagcaaagtttccatgctttatcatctgcaccaatgaggccatatttaagctatattttcatatgaacgtctcttgaagattttaaaatagcaacaaatgttgcaacaatatgcttaaccagaaaaaaaataaagcaaagcagtctatgttgactcatgtgacattgataatgtatattagattatattggttgcttattcagttggtcatgggagaagagccttctttccagccaaagaatactaagaactccctcttctaatgacgaatttcagctgatcttgctgagaatatttagcaagaagacagaaacagagactcctaaagggagctccagagtcctgagatacatttaagttttcattttcctggaacccagagattccccactgttctacaagacaagaccccattctatgaccctgtctgaggagagctcaggggcagtgagctccccctcacattaccccttcaccctatgcccttggggctctgtccatgcaaataagtcccgggttcaagaacgaatagaggcagggctgtgagtgttatgctgtgtgctggctctgagctggggtctctagtagcactctccacatccatagatacatggcccctccgctactccttctctgcctgctggctgccctctgtggtgagttactcatgatttcatacgtggggagacacgggatgaggcaaatgtgtctgtgactcacagatgttctctattctcaggggttcacagtgaggaccaccttgtgcaatgggaggaagaagtagtggtccccttggtcatgctcagcctcacctatgccgcctatgcacattcaatttctgaacattctgtttcctggatccaccatctcccatcaaaaggtcttcagtgtgttggtgtgatatgggttaagggaaacactaagccccaaccttcagggcagagctagcatctccagaaacacatagtaaaaaacaagaaaacttacagctgagaagtgtgatggctggggatgcaggcgtgtattactgtgctcaaggcactgtgactcgaatccagagtgaactcagacacaaacctgccctgcaggggttcttgggaccacaaggggaaggatcaggtcaccagggtgtacttaggaaccactgaactgggtcaggcacaggaggtgggggtcagggctcctccccagggaagggcttttaatctccatgccttgtaaacctctgacaagccaggcagacacagacatatttttaagctatggaaaaagatgtacctttcattttggaggaaaaagatcataagtgtgaaagcaaaacttaccaagggccaggtactggaataactgtaatctacataatcactctaagaattctaagaatttacaagtgcaatcatcctcatttcataaactcaccttaaataagagctttctaactgatcccatatattctgattttgtttatttcttcaacactttattatcttcaaggcatttcactgatgtcaattttagaagaatcatatgcaaacagcctctcgtggtggttgaaagcccacagcctcgccagtcctgtggatatttctggatgttctcagagtctccattgtctgtagagaagaattgtcccaatagttatttcacttttgtcttccacaaagttggaaagatggggatcactcaggggaatcgagatcaacaaacagaaagcctgaacccaccatatacaagataggatgtatttttttaggaatatattaattcccagaccctcaggctcacataccccatgtggaggggaacacacatccactccttcactcaagccaagctggccatgcagctcagcttctgcaggctcaggactgcaagctctccagtgtgggagtggagctaatgggaggtgaggccaagtctctgccctcacagagtctcatgatgaagatctgatgaaatatttccacagtaacatttctttggatatataaatgtagaatatattttgaaataatgaatgatgtatcttctgatggattcatgttggggaggcaatagaggaaaaataaaggtaattttaaatttctgctcccagctacagcacttgattttgatttagtgcatgactgtttgaaattttttgatgcagtcaacttcagcagcccagacctggaagcccagccaataaatgctccagattgggaaatttaaactgatgggagctgtttcatggaggaggaaaaatgctgagccagttgtgcgatcataactattgactggataatagaagcctgtgccctttctgccagtacctctggtccgaaacctgagctaatcaccctcaccaagttgagtaaacattgacacctatactaagtacaccttcatggtggtgcatgctcatggggccatctggaaagaaagaggccttgtctcatcaggaaataaggacattaaacacccaatagaaatggtgttaaactactagaggtgtgttctcatccttctcatcctccattatgcattgccctgagcacccaaaagatgactcattggcacctaaaggaaatcagactgcagaaaaggctgagaagtgagcagtgcaggatgcacacctgctatgagctttgattccacatctggagtttccatagttcaaactccattatactaaatagacaagaagcatgcctgcgactggggatttggtaaaacagatccagatttattctgaaaaactaatgcttatggattattcttactctccgaggccctggtctacaattttaaaacatttacatgagggcacacactccaaatgatattcccttgcagactttgtatgaccatgtgtcagaatggtcagaaaactgttcagaaagtcacatacgagtgtgttttgtgtgccaaaaatatctttgagactgaacaaaatctttgcaacgaagaggtacaacacagagaactgtgactcttggaagattggcaagtggattcactcacatgcctgtggccagtggcaactataaattcctcctgattgttctagatattgtttcaagatgggtagaagcatatctcaccaagtcccaaagagccacatgactggctaaggcataattcaaggaaatcgttgccaggtttggactcccatgcactatacacagtgacaatgatctttcttttatttcagagtttactcaaaaggtaagtcaagcactgcaaatcgaatggaaaccacagtcatcatggagaccacagtcagcagtaaagaaataaaagataacaccttgaagaagacaatagccaaactcaggcaggaaattgacctgcgttgggatagattttttcttattgccttgttctggggcagaacggtgccctgaagtgggcttgggaaaagtctctttgaaattatatataggaggcccttccagacctcttgccagtaacagcacctttagagctggtaaaagagcccagagttaaacaatatgtgcagattggtgcagaccttgctaactgcacatcagcttgctatttccaggcctgtttattccacagtgagcctcttcaccccttccatccaagagacaagatgccactacagtcttgtaaaagtcaaaaacaagatcagcagctgactgaaaggtggaacagaccccatgatgtgctactgattaacctttgttcagttaagttatccaatgtaaagccatgggtgcatcgctgttggagaaaacctgtcccacctcaatttgaccccagataacagactacctggtcacataagcctaaggaaaacctgaagttgctgataaagaggagacaagaagacagataggtaatacccttctgttaatataaaattcttaatgagttctatagttataagtacattatttctccttattaaaactaatcttttttgctgaatgggtggaagatggtggcttccctgcaaaagaaaacatagttggttctgtaaagagtttgcccatttcttccactataggcctgccctggcataatacaagctcccaacgtaagaatttatgattttccatccattggagaagccatcttttccatctattataaaaacagaagacacttcattaatatcactcccactataggctatgccatatccagtgaggtaggatggctgacagtggtgcgaatccaagtaattggtcaagcactgctatgtgtgaagaaacaccacagcatactctacactgtcactcatgatatggaattgttgcctccttagcaatgtaactgagcccttaatatgtggctgggatgacaaggcaatgccagcctgcagagtggaatctgttcttccctctggggttagctacagcctgtggcactcatggctggccctactttccttacaactggactaaaagaagcaactggatatgaccttatatcccaggatgtaactgtccaaagtgcattctctttatgtcaactggaaaagtgtgaaagacagacactactgacataaacagacatcctagttgttctgcccactagccagctcttccccccaggtggcagtcatagatttagaattgcaagtagaggccctggctaagcaaaccaccagtccctttaacaacacctaccatgccatcatcattcttactgaagaaacctcacagatttgacaagtgacactatgaagctatatgaccctaggtattgcaactacagccaaaggtaacacttgtgtattaatgaacactgaatgttgcatatatatacaagattagtcccacaatataactcaagctatgcaagcattagatacccatatttctgctagagatggatgccctctctcagaaccccatgacagcatggtttagttgacttcctaacacatggaagagtttcatatatagtagagctggtattctgttcattgctatcttcaattgctatggattttattgctatcttgcactttaagtgagaatgtaatactgaccttctcaaaaactcctaggtccttgcaccataatgctccaacaaacacctactgtaattccggagactccagaatatttccaactccagtttaatggattcccttccaatacatacaacctatgccctttctaaagaagtagccagaatgactatgacacatgttttccatagaaacgaaatggaatttgacagtggggaatgatatacaggcagcttaatttcaaaatgcattttaaacttagtatttgaggttttaatattattttttatactccctgaaacctgaaatttcacacttacattttaattcagacttaatagcaacaaataaccagaacacatgaattgcctgtaatctctataccttgcattgtaagccacatttcaagtgtaaccttacttgtcagcacagtatgtttaccacaggcataattgcttgtcctgactgtccagaaggcagggtggtattaagtatgcggcctctggagctgggaagtctggctttgtataccgtctctgccactgctaactggaggacaatgggccagttacttcctgtaccccagttttctcatatgtaaagtagggttgttgtaagaatgaaattagttaatatttagtacctaacaactaataggcattacatggtagctattggtattgctatcgtcagagaacacacaggagtccattgttatttttaccctccccctccaaacaaaatgtgtaagacactagacatggtagctctgtaacggggttcgtcatgtattaaactgtgtacccaaatgatatgtcaaagtcctgacaaccagcacttcagaacacgtccttatttggaaatatggtagctggagatgttattagtgaagatgaggtcttacttgagcagggcaggccctcaatgtgggaagatgggtgtctttctaagtacaaggaaatttggacacagagacagagacatacagtgtgccatatgacagcagaggcaaagatcagagtggtgcagcagtaaaccaatgcatgtccgggattaccagtcacctccacaagtgaggaaagggcaaggaagaattctcctgagtctcagagggagtgcagcccagctcacacttgattttggacttctagtctctagaactgtgagagaatacagtcctgtcatttttaagccacccagtttgtagtatttcattttggcagccctaggatattcatacagaattcttcacccaaaaggaagcactctttcacacaaacagtcaaagtcctggatgacagacaacctggagactgcaaacctccaaggaatcaaaggaagttctataaattctaggggccccatctttcaaaggctgctcctcaagtccacacccacactttggaaggagaatcctgctcttggacatgggatccttagtgagccaactgccaataatccaacatcgtcatgaattaaagatctctgacatttcctcttcaccaaggggaattctgtcaagtagtaagtaaaacccttcttcagtaatctccacaccaaacagttctgcatggcttgggacgcctcaggaaacttataatcatggcagaagaaaaacgggaagcaaggcagtcatacatggtggcagaagagaggttaaacttttctgtctctcttgggtgtaaagatataatcttgaggcaaacagcagaatcaattttcttacgccttgaaatagactccacctttctccctttcaccataaatattcccttcacattaatctaactttatgtttgcatcgaactatgtgcctttttggaagttccggaagctaatttgagacagatagacaaagtcgggagaccctgatgcagaattccagaggtgacttcaatgttgctagttaacaacccaggcattgcccagatgatgccagcccaagatctaggtggactgggatgccagagagccgccagaacaagacgcacagacctggttctcagcccaaatcttgcatgcctttcttaccaacttttccttttttaaacccctgcctttccttcaaaattcaagtggttgcttgggatgggaatgcggtcacttcccctttaccattatggttaatacaataatctttgtaccagatctctctcttgttaattggatcctgcaggtggcagattccggaccagagtgaggttagaaactgaatgcacatactgggtggttcacagacacggtgttctgtgaagtttatgggtggattcctggggaagcctgcaagcctgttagtgattagcagaaccgcatccagctactgggatctgcacgccaggtgccgtgagcccctcaccatgttccctggtcccagctgcccgcggatggttcagccttgacaacgggctcggtgttctgggtggtgggagagcaagggggccccttgggcagcgtgctacagggctgtgaatccaggggcccacccggtgttccctgtggagtcactgagggaatgaggggcttctcagggcacagagctgtaacgcctttgtgcagtggtggctgaatacagtgacactgggcgcgtggtgagaagcggggcaaggtcagttcactggaccctccgccctgagcctcagatgagtcgggggtccccagacaggcccggcctctgccctgcggcggacactggagcctttgctgtggccgccaccgaggagccttgacctcaaagcagcgggaacctctctacccacctcggaaacctgaaggcagcggcggcctctcccagccaggacctcgccggcatccgggtctccaggcccaaccctgtaccacataaaggaagtccccgctgagctaccggggggacacagcgccgttgggtgggcgggcgcggcggggcgggaagcaccggggcagctgccacagagatgcgcgggggctgtcgggaagtgggcggtccgggagacgcggggctgatgggacgtgggcggtccggggacgcgcgggggatggcgggacgtcggcgatcggagatgccagggggcagctgggacgtgggcggtctggagaggcgcgggggcagctgagatgcaggtggtccgggacgcgcgggggctggcgggttgtgggcggtccagggatgcgagggggcagctgggacgtgggagttccggggacgcgtggggtcgccaggaagcggggtctaggacttagatccgccttctcttcaggccatgcagccccgaagctccgaatcctgggatgactcctgtccatgttggaagggaccctgccagtcctggcaaggttcaaaggccttagggcaagaaatgttagtagagtcctggaagacgatgtgggaacgggtagcggacaccggatggtgatcgttctcctacaagaccttgacatggatggggagaaacagagaagaaccttccaagtttgtcccactggacatgcccaccacactttaccagcccttttctagaaggcctgtgcgtaacacatgaaaaagctccgctcgacctttccctgaccttttaaaagaaaacatttgctgcatctaatccgcctagatataaggaggttcccaaatgtatgacagagtcagaaaattacatgtcttgtaagttaccatgtgcttgtcttttgttttccgttttttttcgtttttttgttttttgtttttgagacggagtctcactctgtcgcccaggctggagtgcagtggcaggatcttggctcactgcaacctctgcttcctgagtttcaacaattgtgctgcctcagcctcccgagtagcttggattacaagtgtgcaccaccacgcctggctaatttttgtagtttttagtagagatggggttttgccacgttggccaggctggtcttgaactcctgacctcaggtgagccacccaccttgcctctcaaagtgctgggattacaggtgtgagccaccgtgcctggccgtaagttaccatgtgctttttaaaaaaatcatagcaaaggggtgtcttctggaaatgacattttgaaatggtgttattagaccacccctggaagggacacagtaaccacacgtccacgttcgttcagtgggtgagaggacatggaggggagacctgggcaggaagggaagagggttccatgccaggctgctcatatttagaagacattttcatatcattgtcattgttttcttgtgtgcgttttattcctcgctattgtatacatcattggaaattctaagtattcttttgaaatatctagtctttctagatgttctgaagtgcctgatgtatgttaaaattacaggtggtaaaataataaattttgtaaatatctttttgttaaaattcatatgcagtgttttattttattttgatgttggtggggggtggggaggatgaccaaatccctgcttgatcaacacacattgcgtttgtgctctggttcaggggaggagagaggaggagaaagtgcagacttccaggcctctgtgcgcaccgggaggagagattaatgatcatctcttctgtctgtgtgtttgttttatttatctatggatatcctgtgtataaaggatgaacaagtcctatttataacatctaatcttttcaggtgttaagttgccagtgtatgacggaagcagcgttattaaacgaacgcagcttgtacatattgtgttaaaattcataaaaagccagtcttctgaaaagaacccttgggccctccctccgcagcctccggcgccagctgcaggaagacctggccaggggaaggtgggtggaacaagctgctgctggctgtggggaaggcggtggagcccaggcctccacaggttccccacaggctccccacaggctcgcgcggatctggtcgctgggttccgcacgggccgcgtgggggcgcctgctgggagcgaggaggcgccatcctggctcgcctgctccaggaggacgctctgggcctgcgcagatgcagttctccaggatgggcgcgggcgctgggggccgcgctccttgggctgctgcgcctccactgagccgcctgggtgtgaggacctcacgccggcgcctccgggaaggacgcggagccgccgcggccgagcccagggctgcagctgctgcccgacgcccgcgagaaggcccttccgccaccgcccgcgggttcgaacttggagcagctgctgccagctgaggcgccagcggcgtcgggagctcctcagagtcagtgttttgtgctggattcggcatgtcctctgaaaactcgggaatttgtcactgaaatggtgacaggaggtgagaagtttttttagacgttgccttcgctgaccgggcgccgggctcaggcctggaatcccagcactttgggaggccgaggcgggcggatcgcttgagctccggaggtggagaagctgccttcgtggtaactgtggtcttaagttcagctgagaacgataaatggcttttccttgaattggctgcttttgtgatttctctcaggctcatctttcgtcagttaaaaatccagtggtaggtgtagcttagagacgggaaatttttggttttgttttggctacacgtaagtcttggaaattattttcttttacgttccaatgtgagcaaatccagaaggatgtcagattaaacaccgaatttaacaaattcagccgggcacggtggctcacgcctgtaatcccagcactttgagagaccgaggcgggtggatgatgagttcaggagtttgagaacagcctgaccaacatagtgaaactccgtctctactaaaaaaacaaaaattagccgggcgtggttgtgcgcgcctgtaatcccagctactcaggaggctgaggcaggagaatcgccgagattgcgccactgcactcagcctgggcgacagagcgagacttcgtctcaaaaaaacaaaaaaaaaaatcaatcattggaatactgttgttcattacaattaatgaacgtttgatacacgcataaacgcactaaattcacgagtacatataagtaaaataagccaaaaaaaaaaaaactacatcctgtatgatgacacttttatacattctacagaatagaaactgaagtgacatgaaggtcgggagttgaatggagaaaaggtgagagaaaagagggaggaaggcgttgcaagagaataagagaaaatgttgagggtaattgatttgttttctatcttaataatggtgatggttacatcaataatttccaaattgtacattttgtgtgttaattagaattttatattattcaagctattacaaataaatacctgtataaatttcttagggacggtgtaagggagatggataaatcacataaaaagtcagatatttctgaatgtacaatgaataacccttagctctatctctattttttggtaattctaaaatgcagcagttttttttaatgtttttattacaagaagggtttcttcaaaccacaccaggtatgcgtaactctgggataaagttggctaagggagctgtgggatccggtggagaggagcacaggtcccgatcctggagcccattcttgtcacatgtgagctccaggacacatctcatagctccctcatgcttctgggtttacattcacatctgtaaatggaggaccaatgggcatctgcctctaacaatgtattttcgtgtgttaagataatgtatgctaaatgtttaccacagcacaatcttttactaagaaattacattttttccaaatattatcattgtcttcaagccccaccacccactagaaaacttcatctgctctgtgccttgccctgtcctcagacatcctgcccaagagacttctatatagtaggagacatgcaaatagttccctccctctgctgatgaaaaccagcccagccttgaccctgcagctctgggagaggagctcaagtgccaggattcccaggtgttttcacttggtgatcagaacttaacacagaggactcaccatgttgtttgggctgagctgggctttccttgttactattttaagaggtgattcatgaagaactacagatattgtttgtgagtggatattagagaaacagtggatatgtgtggcagttgctgaccaggatttctctgtgtttgcaggtgtgcagtatgaggtgcagctggtagagtctttttttttttttttttttcactttttagcgaacatccatgggttacaaaataatgggttggcttttcttccaacactttacagacaccatcaattttcctcttgcttataaggttttaaccagaagaatgctgtcatcatctttcctgttcttttagaaagaatgccccctcaactcatctccacttgtctgcatgtatttctatttgtctttggttttcagcagttttaataagattcacctaaatgtgtgtgtgtgtgtcgaggggtgttatgctattgttctgtgttctctgagatgcatggattcaccgtttactctgtctccatttttgtgaaaacaattagaaaaaaagtcagtgtgagcctagaaacaagcctccctgaagtgggcactggaccacctgggggcgctcaggacccactgagcacaagagccagccccagggcaggtgcagaggggtgttaaggtctggtttcctgtcagccctgtggcttcctctccataaaacagtttcctttgtggcacatctctggattccttatcctttttttcctgtgaagtctgaagaagaaacatttgtcgtaacaagagaaaaactttctcatatgcaccaaaggcagagtcacctacagtcatttactcctgtttctgaatgtcaataaggtgtcaatgcttctgaagttaatcagctaaatctataaaaggtgcggtgtttaactcagcatggcagcccagctcaacagaactccaagggccagtgagcaagcaggcaggataaagtgcatgctgggcattggggcagagggagttagcatccagtgcaagagaagaaagcccccgtggtggtcattgtcaggactccaagcccacagttccaattgtaggtgatactgggcaaaggaagagagaccccaccaatggttagtgtggatttcgagtctgatggttccacactcacactccaggtgaatatgaaaacatttattaactctatttttgaggtgtctgctgagagcagcacaggcctctcaagaaatttcaaactggaatttcctcagtagacaggaaaggaggctggctcagggctttataatgatttggtggtggggttgggggtgcgtttctactcaggagaaggagattgtgtgatttaaacctcacaggggcatcagataagggagcttctgtgatttcttactagatttaccacatgcaggggataaggaggaggaagaataaaccttaattcgtcagcaacgaggcaccaaaaataggacctgacgctttattctccctagcagcttaagaaaatgagtgaaaaagagagagaagagtccactatgtgtgaaaagcaaacaggtctaaagaaaataaaaattttattactgtaagcacataataaaaagaaagagaagaatgaatgagacaggcaggggtgctgaatcaatgtcctgagtggggccttttcattatccacagttatcagttaattctgaaggtctcaggtcagcttcctgcttcaaaatatcacaggcccttacagtatatgtgaaaatcctcggtttgtcgttcttcactaaagtagccttataattagatgtacttctgaatttaatcttcagttgtgttaaataaaaaaaaacacaatctacaatttaggaaagtgagagtttatttttatcaaggtttacagccatcccatatgctggaaagcatagcttttggtaaagacgagagaaaggcactcccaggaagaaggggttgggcagaagctttatgctgaagggtttggctaaacagacataatcaacaggttacaggaggggctactgatgttcatggaggtggtcctcacacatgcatactgaacaaacatgtctgtaacgtatgacccctgttcacttaccagtggagacttagcatttaaattcattacagtcaggccctatgtgccaatagcagaagcagaaacacaaaggcactcagggtgcagcctctgtaaacggccagagccaggccatggtgagtggtctctgatcaggagaaaggtcctgatatcactctagtgttcaatcaaagctggggttatggcttgtggaacaggggtcagttcatcaggggatgggctgcaattgtcttcatagtgcttgtctcagtgccggtgcttactgagccgctagagaaaacgaataacctattggcagttagaagacagtttaccttttaagtgtgggagtgagtggcagaacccttgcctgacatggctttaggtcttgtttataatttgacatcttattgccacagagattctgttctgtcattcttttggatctctattttaacattagtgttggtcattgttgtgtctaaaccgcaaaggggagtgagtgtaagaggcgcgtctgatcttgtcatggctgggatctcagtttttaggcttttctggagtcccttagatgaacagatggactatttagtcagttggggcacttaggattttatttttgttttacagttcataaatatgaaccctagtattgacattgtgcatattcactgctgtgttgtggttaaaattacctggtaagattcccttcaaagccgttcaagagcaatatcctaccctgatgtttcttccagtaaataccattccctgttttaatgtcattagaggctattgaaaagatgtaggaaaatgatagcttaatctgtcgatgactggagtgggtaagatacagtcatcactttcaatgctttgtcatgcgtgcatgtaataggaagaggtgagctctgggggaaaatctctaaatgtatgggccttccagccaccaaatcataaggtgatgactgatgtctcactgagggacttgactataatgctctagtgctagggagagaaactttggccaaggaagttcaagattttcttaaggtttggacaagtttagttcaagtatgacaattttcttcaacattttcagaagattgtggatgggaatgatgctgagttatataagtaattctaatgccttctgtgtttagataatattataaacaagactgtttgggtataatgacccactacaatatatatacttttagttgttacaccatttcattttcctttaggattttactttctaagttacatgaatcaggtccctaaaatataggcgtgcatctaaaatttattctttggtgagaatttttacgtgttccagaagatatgagaaacttctttgcgtgaagagcatcccaaagtcaggcactcctgtaaaacatgtacttaatccttgtctttggcttattgatgagctctgttgaccacaataaaacttctgtcatgcgggctgacttgacatcaggtagaggaacagattctgaatgtactactgaattgagtgcataacctccagtttcgttactgatgtatgattcatcagagatgatactagatcaaggatttcaatcggaatctaatctaaaagatgtgaataaactttcctaatttagatagtattacttgtgagcacactgctagtattccagccatgtctcctgtctgtcacactgaattcacgctaactttgatctaaaagttaacacttgttctaatgttcaaatatgttatttttattctaatgtctctagattattatctgtggctattttaggcaagagtgaaggaaagcaaggttaactgactaaaaatgagaaaaagcacaacctaatgtaatggaagtcaggacatcagcatctccaggcttgtctatttctagagttcatgcaaccaggggatttcttttctcatttttacacaaagaaacacccaaattgtccatttcatctcccattgactcttatcatctgtctctgtcagtttgcttagaattttggcctccagcttaatccaagttgctgcaaaaacatgatttcattcatttttacagctgcatggtattccactgtgtataagtaccacgttttcttttttcagtctgtaactgatcggcatttagtttcattatatgtctttggtactgtgaatagcacagtgatacacacgtgagttgatgtgtctttttgttccaatgattggttttctcttggacatatacccagcaatgagattgctgaggggaatggtagctctgttttaaattctttgagaaatctccagattgatttcatcagtctcttgggccaaattatatttccaccaaaagtgtgtaagtggtccgttatctctatagccttgcctgcatctgttaatttctgatctttcagtgatagcaattctgacatatgtgagaaagtatatcatttggttttgattcgcacttatctgatgactgaatatgctgagcatttttataggttagttggccacttctatgtgtgtatttgagaagtttctgtgcatgtcctttctccatttctaatggggttatttggtttatgctggtgattaagttccctatgaattaccaccttacacacactaagataatcagcattcaaaaaagaaaaatgaatagaaaaacataaccacttgtaggtatagacatactgaatttggaatggtcatggcttgcatgttggtattgaaatgggacagcaactttggaaaatggtcttcacagaaaacctcataaatgtagctagtgtcaccactcacagaagtagatggagaatacaactcaagtgtccatcgactgccagagggatgaagacgccgcggtgcgtctgtaacccacagggatgaagacgccgcggtgcgtctgtgcatctgtaacccacagggatgaagacgccgcggtgcgtctgtaacccacagggatgaagacgccgcggtgcgtctgtaacccacagggatgaagacgctgtggtgctttaaaaaggagtgaagcactgacataggctgcaactcggatgggccttgtaaacattgggtgagtgaactgagggagacacggaagtctacatcctgaattgtcctattgacatgaagtatgcagaggaggaaaatccctagagacagatcacagggggtgagtggaggggaaatggagagtgacgcttaatggagctgaggttttcttttctgtgatgaaaatgttcccaaaccaaatactggtgatatttgcacaacattgcaaatgtgtaaagtatcactgacccgtacacttaatcgtggctaaaattgtaaattttatgtcatgtgtatctcaacacaatagaaatgagcaccacattttgtttagtgactcaacaacaataacatttaggtttaaattctggattccccaacagaaccagtgcttcctgctggagctggatccatcagcccccagggaagggatggagtgggtcaggtgcacaggtcatgaagggagcacaaattctaacccactcctcaagagtccagtcaccacctccagatctatgtccaaaaacagctcttcgtatggctgagtgacattagcaacaagcacacagccatgtttgtttttttgttttgttttggtgtgtgtgtgtgtgtttttgatagagtcttgtgtcacccaggctggagtgcagtggggcaatcaatcttggctcactacgagctccacctcctgggttcaagtgattctccagcctcagcctccaagtagcttggactgcaggcactcaccaccacacctggctaatttttgtatttttagtagagacagggtttcactatgttggccaggctggtcttgaactcctgaccttctgatccacccgactcggcctccaaaagtgctgggattacaggtataagccactgtgcccagccacaaacaagtatttttaagcaaaagacacagtgaagagacttcagtatgagcccacacacaaaccttcctgtgggagtttacagaacagcagtgggtgctgaggacagaagccagcacccaggaaccagcagggaaacccagggggcatttggcaccgcctgaaggctcaggaccattgtggggctcagtggtcaggcaggctcaaggttcagcctcagagcaggtgtagcaggcggcgaaaggctctgaagacggagtttagtgtcaccttctcatttccactactaaacaccctccagcacatctattctaatgtgtatgggtgttcatgtgtttagagaatattatttatgttatgaatctatagccatcttgtgggtgcatcaagttaacctcttcaacctatgtggaccctgttcattaggaataagtccctgtatttgaggacctcacaaattaataattatgtagaatcactttctttttcagtctcctttccttcctctttctttctttctcactcacacactgacaaacacacggggtgccataacattaattacctgatgtattaaagaatattgattcatttgcaacttgaccagtttagctgttgttcatgttgttgtaagatcaggaacatgtttctcagctgtgtactcctctaagctgagcagcagctttatttgaaatacacagaaactgaaaacaatccaaatattaatcagcaccttcataagtaaacaaattgtggaaaagtcgtttattgggatagtacccactactacaatcagtaaatgttggatacgatcaacagcatggttcaattcacaagtacatatgatgagtatagtgagccaaagcacatacatatgattccgttttataaactgtacaaagtgaatactcattggaaattacataacaaagatcactaactgacttctccatagtaagagaagcgaaggtataggagggagaaattgtgagagacaaagagaaaattgagaggcgaattgatttgttttctctgtgaatggtcattaggtcaatgtttgtcaaatggtgaacatattgtgtgaagattatatgtctgtattacttcattaaagctattataaataaaagtctaatgtggtagaaaaagatgaagagagaaataaaaataatacaagaaaagtcatgaactcctgaatgaattaacccttagtttttctctattacttataaaaacaccaagatacagccaaataatatcacgatatcattataagaagagtgttttgtaaacctcactgggaatttatagctctttcctagagttaattttgggaacagttggatccaattgtgagaaatgcaggctggacactgagactggctcttatgagatgtgagctcttgtctatgtcacatggtccttccatacttgggggtttacattcacatctgtaaatgaaggaaacattgactctcaaagaacatatttcatgtgcatgtaaaagtatgaatgctagtgagaattaattacttatgaagtataatcacccacatccactcttggacacagcccactctgaggcatctgttacagaactcattatatagtaggagacatgcaaatagggtcctccctctgctgatgaaaaccagcccagccctgaccctgcagctctgggagaggagccccagccctgagattcccaggtgtttccattcggtgatcagcactgaacacagagaacgcaccatggagtttggactgagctgggttttccttgttgctattttaaaaggtgattcatggataaatagagatgttgagtgtgagtgaacatgagtgagagaaacagtggatatgtgtggcagtgtctgaccagggtgtctctgtgtttgcaggtgtccagtgtgaagtgcagctggtggagtctgggggagtcgtggtacagcctggggggtccctgagactctcctgtgcagcctctggattcacctttgatgattataccatgcactgggtccgtcaagctccggggaagggtctggagtgggtctctcttattagttgggatggtggtagcacatactatgcagactctgtgaagggccgattcaccatctccagagacaacagcaaaaactccctgtatctgcaaatgaacagtctgagaactgaggacaccgccttgtattactgtgcaaaagatacacagtgaggggaagtcagcgagagcccagacaaaaacctcgctgcaggaagacaggaggggcctgggctgcagaggccactcaagacacactgagcatagggttaactctgggacaagttgctcaggaaggttaagagctggtttcctttcagagtcttcacaatttctccatctaacagtttccccaggaaccctgtctagatctgtgatctggatctgctgaaactgcctgtgtcaccttcctcacctgtgactattgggggagctgattgtggacactccagtgtgtgggatttcttggtgacagcaattgtgtcttctgtctagccatgtctagggctgcccatcaggaaggtcaggctggaatttttggaaagaggcgcacctgccatccaccaggaaattttgttgtcttttgttctgctagaactaaatcagacacaccaaggttaactagcactatcttcctagcttgagaaacttgatggcaggcttgaataacacctgtatgaagccatcagagcaacaactagattaatgtctgctagaattaaatcaggcacaccaaggttaactagcactatcttcctagctcgagaaacttgatagcaggcttgaataacacttgtatgaaaccatcagagcaacacctagaatagtgtctgatttaataattgagactatggtctagccaaggagacacataaaacatgatttccatggttggttcatattttatatttattaatagaatctggctggtattataaacagctttgccaaaatatatgtgttagtgttggtcttcggagaagcaaactctgtgactggattagcttcgtgtacagtttccttcgtgtacagtttccctgtccactcttctgagaggaaatgcagaggtggtggaaggggtctggggtagctgaatgcatatgagggaagtcggtccctgagtgaaggagaaagggaggaggactgggtggaactttcctaaacttctttgttgttctatgaaggtccagcaaggtcactgaatcagagtcgtgtcacagttcccatcagggacccagtgactcccagcagtggctctgctcagatcagcgcagagcttgttcgtctcctgagagtggagcacaggacgtggctccaacaccagccatggcatggaagacagagagcagccctgggtgcctgggtcaggtgcattgtgctccctgcaggtggagggagggaagtgctgactcagggcccagagactgtgggttctatacagaacatacacttttacttcatttctgtggatgacatagaaacaaacatgcagtctgtaaacaatggtgattcctacatttgccccaattgctttattccttaattctgcagaatgtcctggcacagaattgcctttctcatgtggaattgtgtcgtgtgttgtggatgtgtgagccctactttcattgttttcccccatgtacagagctcctaaatagagaacagctgaccctccttctacactgttgctctcctccccacagagagagcacataattacctgaggctgaatctgaggtgggatctgtcctctgaacctcagagcctgcagagacccccagctgcagattcatggagtcaggtgtttgtacatgtgggaaccttgagctgttcttttgtcagtgaacactccttaaaactaattgtgggttcagaattaggacacccattgatctatcacacctcagctcattctgccactcagaatctccagaaattcaggaaatggttgaatgtacatttttgtgacaaatttttctcatttcacttagttgtgagtttggttagcagaaagtgctaccatttatgggtcccaaactgatgaagctcatttgcttcaacagaagttaggaggctcctaaaacttctcatcagcccttctctctgcacttcatgtgaaattcagttttacctggaattctggtgtgttggtttagccagagttccccatcctccatgtctgattttcctgggtatctgatcagtttccttgcccttcaccatacctcggtgacgtctaatcaccctggcccaacatcaagaattctggcaggttggtttaagcaagatttgctgtgcccctgatgtttcctctcagtaattttccatcttccggaccccaccctgctgcttggctttaaatcccccatgtttccattctgcatttggagttcagctgaatctctctcctcactgcaaaacaccattgccctgatcccgacacctaccatgaggaccctggataaagtcttccttactgtgctggaacaagtgtctttacttgatattttttctttaataaatctacctttagtgcttcctaaattgctcaaggaacctcgaaaaataagataagtgcgattatccattttactgtgtgtgtatgtgtgaatttcaatttccatgtgtggtgtccagaagtcctgagcacaaacagttttgcttctctgtccaattctttgcttctgaaagccaggagtcatcccaacattggtaaattggcgatttgtttttactatttagtgactgacatatttcacttaacctgaagcttcatgaacacattgatgaaaagtagatagaagacttgtttggaaatgccagatttagggtagactttaccacccacgtgtgtctggagatctccttaggattccaagaacagggtggtttttttccaccacaggacaaggatgagaacctccaagctgtgatgataaaggacaggcagggccatgtgtggacaaggatgggctgctgccacgtccagagtgttctctcctagcaacgccgccatctccttcctcacactgtggtatttgtcagatgggaaacatgcctagaatttatctttgacatatggatggaagcccaggctagaggcatttgacagcttatttctgaacctacttctttaaggaatgcccagatcccttgctctgcttcctggttcttaacccctttagctcccttccgctcctgcacccatgcactgcctctttacggccacttccccacacccttcactgtagcaccattttcttgggctccttggaaatatcacagctttggtttaactcacagatcaggcacactcatgggcccctccagaggttctcgatttccctccctcaggctcctccctggggtcctaacttggccatctctatcctctcttctgagcctggccatccacaatccatcccatctggacttgtgtatagcactgggttaactcagcaggtatgaattgttcaaaccctgcacattcctaaaaaataactaaaaaaaaaaaaacttttgttcatttattgctgttacctactgtgatgagatctccgagtccataaaatattgcacctgataacagtgtctgtggatgtctgtagccttgggacatgcggtacaagtttaatcagtgatttatagtgaatgtctacttttgttttgctggagagggctgtcgtctgagtattgtggtcagttccccaggtgttccatagtctatgattcattccccaaacacagccctggacaagagagctcagcggcactccccttgttgtcaacacttcacacaagccatcttacctcacagctgaacaattacacatgtgtagaaggctccactgtgagaggacacctgagagcttgtgcctggattctccagggcttcactccttgtgccttttgtctttacttattttaaattgtatcatttttctgtaataaactgttcctgtgaatagaacagttatgagtcctgtgtttttactgatttttcagcctacaggtggcagatgagaactctcaacacagttgtgttagaagaaggatttcctagagagaccctgactcaatgatgatacatggctgaagcattgcatggaaaacgtaagtgttcaggtatggaatggcaaaatttgatacctggggagtgacagaatactacagtctattacagcagctgagctgaaatcggtttctggaggtaaatgggatttagaaattataaatccaactcccaaggagctggctcaatcaatacataatgaaatgtgaaatgattagaaatagcctaaatatgcaatttccatctgtgagagctaagtgaaaatccaggagagagttggcagggagagggatactgcaccaacctcagattttgaccattttcatttagggctgatgggctcatgaccactagagttagcaattacactgtgataaaagataaaagcttcacaaactctacccacccagaagggggctcaggtggtgaaatagggagggtaaggcatgaaacgactgaaatatgggaggatagtgagatgggttctctctttttgagttttatcttttgcttctttactaatttttgttaatctggatttggagaatgactagtgtaaaagtggattctgttttgagtcccttagaatggaggagaatgtgtgggccaatgttgtgcccagagactactacagaacaatagtagatgaatgtacatgacccaaacacaaagctttgtggttgctgatgggagagctgcactgccctggcctactggataacagcttctccaaagtgtatttaccctgacaatggagattgcctttctcttttaagtgaaaaaaatggaacactacaataaagtagtggtaatgctgtgtgtgtatgtataagacattctggagtgggtttgtgataattgggatatgtatcacttatccttttatttgtataaatttatggggtgaaagtgccgttttgttacatggatatattgttgagggataaaatctgggctttgagtatagccatcatctggatggtgtatattgtacccattaagtaacttctcatcccacatgccactcccaccctcccaaccttccaagtctccaatatttcttattccacactctgtatccatgtgtacatattatttagctctcacttatatatgacatgtggtattcaactttattcttctgagttctttaacttaagatagtggcctacagtttcatccatgctactggaaaatacataatttcattccttgtctattattgagtagtaattaaatgtgtatatgtacatacacatgtatagtgtgtgtatgtgtggggatgtgtgtgtacatatatgtatatgtatgaacatatacgactgtttcctttatctaatcatttactaatagaaacttagtttggtaccatgtatttgctattgtgaatagagcagcaataaacatataaatgcaggcatctatctgatataataatttatcttcccttgggtagatacccagtagtgggactgctgaatgaaatattagttccaatattaattatttgcaaaatctccatactgttttccatagagcttatagtaatttacatttccactagcagtgtataagcactcctgcttctctgcatccttactagcatctgttttttgttttgttccatttttctttttgactgttttaatagtagcttttctgactggtataagatggtatctcactgtgtctttaaattgcatttttctgatgattaatgtcattgattattttttcatatgctggttgatgatttttttgtcttttgaaaaataaacattgtagtaatttgctcatttttaatgtggttatttgtgggtttttgtgttgcttttgtttcttgtagtttgtaaatattagctctttgtcagatacagagtttaaaaatagtttatcccattctgtacgctttcggttaagttttttgattatttgttttgctgttcagatgctttgcttcttatttgtattaagtccaaatggtctatttcggtttttattgtttacttttaaggttgtagtcatgaattctttgcctaggacaatctccagaacaatatttcctagaatagcatctgcaactttcagactctcaggtctcccagttaagtcttttatccatattggcttaattttggatatagtgagagatacgggtccagttttattctgctgcaaatggctgttcagtttttcctgcacaatttatataacaaggtgacctgttcccagtgtatgcttcttgtctagtttttcacagtcagtttggctgcaggcatttgactttatttatgaaatgtctattctgttccactcatctatggctttctgctagattgttacttgattgttacttgtgtataataatgctactggtttttgtatgcttttttcatttattctaaaactttactgaattaactcatcaattctaggagtattttgaaagaatattagtttttttaagtacaaaatcatattatcagcaaacacaaagagtttgacttcctcttttccaatttgagtgcctttatttctttctcttgcctaatttctctggctaggatttcaagttccatattgattaagagtggtgaaagtgggcatccttgacgtgttctgagtcttaggaggaatactttcaacatattcctattcagtataatgttgtttcggagtttgaaggtgatttatggagaatgagagatgttgagtgcgagtggacatgagtgagagaaacagtagatatgtgtggccgtttctgaccagggtgtctctgtgtttgcaggcgtccagcgtgaggcgcagctggtggagtctgggggaggcttggtacagcctgggtgggtccccgagactctcatttgcagcttctagattcaccttcagtgacttctgaatgcactggatccgccaggcttctgggaaagggctggagtgggttggccgtattagaaccaaacgtaacagttacacgacagaatgcgctgcatctgtgaaaggcaggttcaccatctcaagagatgattcaaagaacacactgtatctgcaagtgaataccctgaaaaccgagtacacggccatctattactgtactagagacagtgagggggaggttaacgtaggcccatacacaaatctccctgcaggggcgcgcagggccaactgggggcgctcgggacccactgaggatgggacaggtcccaggggcgggtgcagggggaggtttcctttctcagctgcaggaggcgggtttgtttttgcaggaatatggagtcttatgaggttttgatattttactatggttatttatcatgattttttaaaattgggatttgtgttttagtaatttttaaatttatatgtaggggtatttttaaaaattaagttttagggtacatgtgcacaacgtgcaggtttgttacatatgtatacatgtgccatgttggtgtgctgcacccattaactcgtcacttaacattaggtatatctcctaatgctatccctcccccctccccccacctcacaacaggccccggtgtgtgttccccttcctgtgtccatgtgttctcattgttcaattcccacctatgagtgagagcatgcggtgtttagttttttgtgattgcaatagtttgctgagaatgatggtttccagcttcatccatgtccctacaaaggacatgaacttatcattttttatggctgcatagtattccatggtgtatatgtgccacattttcttagtccagtctatcattgttggacatttgggttggttccaagtttttgctattgtgaatagtgccacaataaacatatgtgtgcatgtgtctttatagcagcatgatttataatcctttgggtatatacccagtaatgggattgctgggtcaaatggttatttctagttcaagatccctgtggaatcgccacactgacttccacaatggttgaactagtttatagtcccaccaacagtgtaaaagtgttccctatttctccacatcctctccagcacctgttgtttcctgaccttttaatgattgccattctaactggtgtgagatggtatctcattgtggttttgatttgcatttctctgtaccctaaaacttaaagaataaaaaaaatccttcaaaaataattcttcctaataatatgcacttattctcctaggttgtattaacatctgttgatatcttcaactacatagctatggcgacattaatttacatctgtagacatatgtgtaaatacacaaacttatgcatacatgtctagtcttttatatttaatataataaaatcattataaaatatgtcctaatgaatgaaacttaatgattaactaaatataaattatagtaatccattattcattgcaatgattctctatagtttacataaattggtatctatttgtaagcttaaatatagtgtattggtcattttaaaatggccaagaacaaatttcaaatgtccctgtcacacaaacacacacaataaggatttgaggatttgagttgatatatatgtcaattagctagattcagttattccatattgcattcataaatcataacatagctttgcactctataaatacatagtcaaaatttctcaattttcaatgaaattttaattatacattttttaatccgtcctaggtcatgatttttttctccctgtcaggatatgattagattgtcctgagaaactcattcagcctcctgcctcctgaaggcttcaaaggcttcaggaagtaagctcctggatgggcagaagcaggcaaatctttcatgtgcacaggacctggagcatctctctttggattaagccccctcctcaggattacagggctcttcatttttctcaacaggctgttgtaccagataagcacaaaaacttaatttcattatgctttgctttttttaaaaaaaaaaaatgaaggtaataattttaacaataaacatattacaacctgctacacatgagacccttcttgtgcttcgacctttcttctcaggagtttatatgtattacatatattcagtttttttctgagttggaatgcttattacagattattccccttattacagattactcttttaatttatctcttagaatgatttttcgagagcccctgcctgcccgcgcctggtggaatggagcagagcctgggctgagccaggcgcgcaggggcctccgcacgtgccgcgccggtagcagacgccaagcgggcggacagtgagcgtgagaggccggctcggagtggccgccggagcagtgccggggatggaagaacagcccatcttcaccaccggagcacaggtcttccagattgaccccaacaccaaaaagcactggatgcctgcgagcaacaggcggccaccgtttcttacttctatgatgtcacaaggaacatctatgggatcgtcagtgtggacggagccaaggtgaccataaacagcacaatcacaccgaatatgaccttcaccaatgtgtcacagacgtctgggcagtgggccgacagcagagccaacacggtgtttggtttggggttttcctctgagcagcagctgacaaagttttcagagaaattccaggaggtggaggaagcggccaagacagccaaagacaagacccaggagaacatggagccctcgagtaataatcccgagaatccgggcatggagccccatcttctactccggcatccagtgtcaacgggacggacgatgaaaggcctctcaggccgctgcagctgacacgcacctgcagtctgggaaccacaagctgaaggcggcctcgacgcaaagagctgcccacgggaagaggtgggagatggagctgcagacccggcgggagagcgacgcccggctgcccacggcgctgcaggagtcggtggccagcgtggagcagaggaagaggccgtgagatccacagagaggagaagaacacgcagctgaagaggaagatagaggagctggaggcggagctccgagaaaacgagaaagagtggaagtccccaaaagcaaagtaaaactactcctcagctcaggtgagtgcaactgtgtctctgagaagatggaggcggcagagagaggatcaaaccctggaagacaaagtgcgttccctgaagagagacactgaggagagcaaatccagacagcgccacctgggggtggaggtgaagagtttcccggaggtgctggaccggaagatccacaacctgcctgacttccgcccaggccttgcatactgtgcaccaataactagggctggccgaggcccaggcccctcctgtgagtcccaagcgtgtgtgcgagaccagatggcgctaggacgttccctgtgtgcgttgcttctgtaaatgcaggcgcagtttcttgtatttccaaaccaactgtgccgtctactcaccccttcccagaatagaaatctcttgtccaggcacagtgtctcacgcctgtaatcccagcactttgggaggtcgaagcgcgggaggatcacgaggtcaggagaccgagagcatcttggccaacatggtgaaaccctccctgtctgtactaaaaaaccaaaaattagccaggcttggtggcaagcacctgtagtcccacctacttgggaggctggtgcaggggaatcgcttgaaccaggagagagagtttgctgtgagccgagatcgcaccactgtcctccagcctgggcaacagagcgagactccatctccaaaaaaaaaaaaaaaaaaggaaaagaaaatttcctctcgcttctctggccttgtgaggttgtggacaactggaagattttgactcaggaatccagaactaggtctaccttcaacatttacacagtcaggccagggatgtttatatttttcataagggctgttgaaaccatatgaactgaaaaaaagcactttctaatccaaatattgatattctttacaccaggtcatcgggctccttttatcgaatagcattcagggtatttgaatgtccatcaggcgccaggcccagggggcacagggagaacaacattcctctccgtcaataacgagaggctttaaaacaactgtttagtggagacttatcgagatgccaaacaggtttctggtgggtacattttctggcctggggatcacctgcatccacgatattgccctctgccccccagtttgtatggttgcgacaatgttccttttcttggttttaatttctgagcggatgattgtggtgcgggaacagcacacagtgagggtgcctagcacaatgcctggtgcaaagtaggttttttataaacgtttgtgcggctcacacctgtaatcccagcaatttgggaggctgaagcaggcggatcacctggggtcgggagttcgagaccagcctgaccaacatggagaaacctcatctttactaaaaatatgaaaaaaaaaatagccgggagtggtgcatgcctttaatctcagctactcgggaggctgaggcaggagaatcacttgataccgggaggcagaggttgcagtgagtggagatcgtgccattgcactccagcctgggcaacaaaagtgaaattccgtctcaaaaaaatttttttctaaagccccactcaaaaccagggtattattagcagtgtaatagttgggccacagttgaaaatacattcaattcagttcatgtgctctcaaatatcctttttccttttaaagttgttctcagttgtaatattactcaaaatattagtaatttatactaatgacacaggttacaatattgtatacataatttagtgacatttgattggaaaaaatacatgttccccatgtcttgagtattttttccttctctataaaatgtatgcttataattatttaagtttcagatgctagcattatctttttgatatctgggatttaattttagtaggtatactggaatgccttttattaattcatataataatgttcatattttagataggattttaatattaattttactatttactgaatttcaaacttttctactttttttgtttttatgagataaaattcacacataagaaaaaatgcatagatctgaaatgtgtcactagagagtttctggcaaatgtgaatacctttgtccccagcacctaaggtagcctgaagagcaagtctctccccaaaacatgcgtctttttctatgcctgtggtcaaatcctgcatggggaaaggtttcgatttctgacactatagatgtattttattctgctttgaactttatataaatggaatcaaacattatagactttttttggtaaggggctacttttctatttttgaggttaattcatgctagctaatgtataaaattagatcaacatattgtcgtttattcaattcatagacagactgtgatatgaaccaccaaaattttcatgtacatggagagagagagagagaaagagaggaagcagagatattttatatctgagtcagtccattaagtaaataaatgacaatattttcatttatttttatgtcagtggactttaaatttgtgtccagtttatgaatattatatgcagagctgttacaaatatcttagtgtaagttttctgatgttctatttttattgagaaaatatgaagtatgtatttctttattctaagagtaagtttaatttttttcagtggtattgaggcataattgaaatatttttataatatatatgtttaaggtgcaccaattgatgttttgatattgtattagtccattctaacactgctataaagaaatgcctgaggctgaggtgggcggatcacgaggtcaggagatcgagaccatcctggctaacacggtgaaaccccgtctctactaaaaaaaccaaaagttaactgggcgtggtggcaggtgcctgtagtcccagtactccggaggctgaggcaggagaatggcgtgaacctgggaggtggagctttcagtgagctgagattgcaccactgcactccactccagcctgggcgacagagcgaaactctgtcaaaaaaaaaaaaaaaaaaaaaaaaaaaaaaaaaaaaaaaaaaaaagcttgacactgagtaatttggaaaaaaaaaaagatgtaagatgtttaattgacttgtgagaactcaactcatgcattgtcatgaaaacagcaccaggagtcagttctaaaccattcatgaaggacccacgccatgacccagtcacctccaaccaggtcacacttccacaattgaggattataatacgacgtgagatttggggtaggacacagatccaaagcatatcagatatacattgtaaaatgctcatcatagtcaaggtaatttgcatatccatcttctcacagagctaccgtttaattttttttaaatgtagagcttgtgtgtgtatgtgtgtctgataacaacacctaagacctactcttagcaaaaatcacttttacaatatagtattaaatacaggaacattgctgtgcattagatctccagaaatgattcagcttgcacaactgaaactctgtgccctttgaccgatatcacccaatttccctctcctcccaggtcgtgggacccagtactctactcgctgctatcaagaacttggatattttagatcctacatgcagatgacatcgtgaagcatttgtctttcggcatctggcttattccacttagcaccatgtcctctagctccatccgtgttgttgcaaatgtcagaatttcctttttttttttgaaagccaaatgaaattcagtttatatatatacattttctttatacagtcatcaatctatggtcattaaattctttcacaaatctacactattataaataatcttgcaattaacatgtatttgacatcataattttatttcctttgacgatataacaagaagtgggatcaccaggtcatatgatagctttatttttcaatttattgactaaccaatcttaccatacgatataaggataccctcttcaccacattcttgccaacatttgttatcttttgtcttgctgataataaccattttaagtggtgtgaggtgatatctcattgggctttttatttgaattcccctgataattaggaatgttgagtacctttttaggatctgtttttcatctgtgggtcttctgaaaaaaaatctaaccaggtttttgccctctgtattaggtcagttgatatttgctgttgagttgtatggttaatttatatatttgggtggaacttcttgttagatatataattgcacatagttttttttactgtgcttgcttttggtattaaattcaaataatttctgaatcaatgacgaatatttttccatgttgtctatgatttatggtttcaggttatgttcatttttagttgatttttgtatatggtgttagagaaggtctagtttcatttcattttttttttgcacatgcatgaccattttctacaccattgattgaggagactgtcctttcttcactgtgtgttcttggcatacaaaattaggaagacacataattaaaaaagaaaacatcagatgaatattcctggtgaacatagacctaaaagttctgagcaaaatactagcaaatagaatccagaagcactttaaaatgtgatacatcatgatcaagtaggctttacccctggaaggcaagtttcattcaacatccaaaaatcagtaactgattcactatgtaagcaaaataaaagcgaaaaacatagattatctcaatagatgctgagaaagcttttaatagcatccaacatccactcataataaaaaccctcaacagactaggcatcagaaaaatatacctcgaaattataagagctatctatgacaaaccacagtcaacatcatactgaataagcaaaagttcaaaccccttgagaattgaaaaaagacaaggatgccgtctcaccactcctattgaacatagtattagaaatcctagtccgaggaaccaggcaataacaaaaataaaaggcagctgatatggtttggatttgtgtccccacccaaatagcatgtcgaattgtaaccaccaatgttggaggtggcgtctggtgaaggatgattagatcatggggatgtgttttcctctctcatgctgttctcctgacagagctctcaggagatctggtttcaaagtgtgtggtacctctcccttatctcttcctcctgctgcagccatgtaagacatgatgtttcccattctgtcatgattgtcaggttccccaggcctccccagccatgcttcctgtacagcctgcagaaccatgaattaaattaaattaaagaattaaatatctttataaattactcactcctgtgtgtttctttgtagtgtgagaatggactaatgcagcatccaaatgggaaaagaatgcaatgtatctgtccaaactgatgataaaattctatacctataaaattctaaagactctgacaaaataattcaagagagataaacaactttggtaaagtctcaggatacaaaaatcaatgtacaaaagtctccagcatttctatatcccaaccacatccaagctgagagtgaaatcaagaacacaatcctgtcccacttacaatgctcacaaaaaatgaagtgcctgaaaatacaggtaaaaaacaaggtgaaagaactgtataaggagaactaccaaacacagcagaaagaaatcacaaatgacagaaataaatgtgaaaacatttcatactcatggattggaagaattgatattgtaaaaattgtcatactgcccaaagcaatttacagattcaatgctatttacataaaactctcaccagcattcttcagataaatagaaaaaaaattctaaaatttatatggaataaaaaaaagaccctgaatagccacagcaatcctaagcaaaaagaacaatgccagaggcatcatggtactgaatttaaactacaccataaagtcatggtaacaaaaacagcttggtactggtaaaagggcagacatgcagaaaaagtggaacaaaagagaaagcagaaataaagctgcatgcttgcaaccatctgatatttgataaggctgacaaaacaagcaatggggaaaaaactctattcaataaatggattctggcagatatgcagaatgcaagagtgaaggaggttgggcagcttctacctagatttcagaagatgtgcatggagaaccctatatgccaaggaagaagcctgctgcaggagtggagccaccacagacagtgtctattaggacaataccaaagatggggaaagatggggtcggaacccccattcagagtccccactagggcacttcatagtaaagctgtgggaatgtggccacaaccctcaagatcccagaatggtagagtcaaaggcagcttgtcctctcagcctggaaaaccttctggcacttgactctaacctgtgaaagcagcaccatgggctgtgcccagctacagggatgatattcctgaggtttttgggaccccctttgtcctagtgtgccctggtggaagtacataaagtcaagagagactattttgtagctttaagatttaatatctgccttactaggctttaggtgtgtctagagcatgttggcagttcctttggccaatttattccttttgtattgacaatatttacccaattcctgtggcactattgcaccttggaagtaaacaactgtttaaaactttttttttttttttttgagacggagtcttgctctgtcgcccaggctggagtgcagtggcgcgatctcggctcaccgcaacccctgtctcctggcttcactgcctcagcctcccgagtagctgggattacaggcgctcatcaccacgcccgactaatttttgtatttttagtagagacagggtttcactgtattagccaggatggtcttgatctcctgacttcgtgatccacccgcctcggcctcccaaagtgctgggattacaggcgtgagctgccacgcccagcctgtttaaaacattttgcaagctcatagctgcagagaaattgccttaagactcagaggagactttggtattttcagtcggaggttgaccaagtgaagagtttggtcactattaaaaaaactattaaaaaaaagatgactttgcaatctaagaaggacatgagatcaggacacaagagtaaaatggtatagtttagatgatggtccctgctaaatctcaaggtgaaatgtgattcacagcatttgcggtggggccgactgggaggttttgagacatggggaaagatccttcaggaatggcttggtatccaccccatggtaattagtgaattatttctgtattatctactgtgagatctgattttcaaaataatctagcaaccatcctcccctttcatgtcctccctctcaccatgtaacacagcctgtttcccctttgccttccaccatgactgtaagctttctgaggccatcacatgatgcagatgctgatgccatgcttctcacttagcctgcagaactatcagccaaataagccaaatagactagtacactgtccaaagcaatatacagattcaatgcaatttctattaagtaaccaatataattgattacatattttaaaaaaccataaaatttatatggaatcaaaaaagagcttgaacatcaaaagcaaccctaaggaaaagtaacaaagctggaagcaccacattgccggacttcaaattatactacacagatataataagaatgacatcatcgtagtgacaaaaaataaaaattgatgtaacacaacagacagcccagaaataaagccaaatatctacgaccacctgttatttgacaaaactgacaaaaaatatacactggagaaacaaccctttattcaataagtggtgcttggaaaattgggcagccacacaaagaagaataaaaccagacttctatctcacaatagacaaaaattaagtgaatatggattcaacacttaaaaatataaactgaatctacaaaaatacttgaagaaaatgcaaaaaaaaagttctctggacattggcctaggcaaataaaacatgactaagatttcaaaagcaaatgcaatgaaaacacagacaaacaggacttaagtaaaaatcttctgcacagaaaaagaaataatcaacatggtgagtaaacaacctgcaggatggtagaaggtatcatctcacctcagttaacatggctcatattaaacacacacacacacacacacacacacacacaaacaaaacactaaccaatgctcgtaaggatacagagaaaagaaaactcttatgcattgttgaggagaatgtaaactagtacagtcactatggagagcagtgtggaggtacctcaaaaaactacaaatagaactaccgtatgatccagcaattccactactgcaaatttatccaaaggaatgaaaatcattgtatcagagaattctgcaccccagtgtatgtggcaggacctttcacaatagccaagatatggaatcaacacaggtgttgaacacaagagaataatggttaaagatgatgtggtgcatatacatgacgaagtactcatcagccataagaaatgaaatcatgttatttgtggcaatgaggatggaactggaggacattatgttaaatgaactaagccagggacagaaagtaatacaccttgttttctcactcataggtggatacttaaaaaaaaatggtctcctagaagtaaagaatagaacagaggataccagacgctgggaagggtagggtaaaggacgagataggcagagatttgttaaataatacaaaattagagctagggaggaggaatagattataatgatctttaccactgtaggatgatacggttaacaataatatgtagttttaaatagttagaagaaggatactgagtgttcctaacaaaaagaaatggtttgagatgatggatgtgctaattaccctaatctgacccctatgcattatatgtatcaaaacatcactatgtacctcatgaatagttacaattattgtctattaaaattatattttaaaataacacaaaattcattggcagtgacataaatggaggctctgggataggtgtggggataaagggaggctctgggatacattacaggcctaacatgtcagtgggcagaggagcttccattagctttttctatttgtagcactgagtagatgtgacatttctcaaagtttgccctacaatagagacctgagttccagggaggtcttgcaggcagctgtgcagatggaagaagcaggagtagagggttgctggcccattcaacaatagtaggatgattattgtgcatgtagagaagtcaacattgttttaagtagttgcatcactggatgacatgaaaaacaaatccagtggaaatccttaaatattattggtagtgaaactgttttgggtgaggaaatgttcactgaagttaagtgagccagtaaagctgttaagaactataaaaacattggattggattcagctttgtctgaatttaatgtgattattactggctcaggcaggggtcacaaatcaagatggataggtggtaccaaccagaaaaagccatggaccagaaagattcacagctgaatttattcggatgtataaagaagagttgctaccaatcctagtgaaactattccccaaaaattaggataagggactcctccctaaattattctgtgagaccagcattattctgataacaaaacctggcagagactaaaaaaaaagataactttgggccaatattcatgatgcaaaaatgctcaatgaaatactagcaaactgaccacagcagcacatcaaaaagctaatccaccatgatcaagtagactttgttcctaggatgcaaggttggttcatatacgcaaatcagtaagtgtgattcgtctcataaacagaactaaaaacaaaaccatgctatcaatggacatagaaaaggtattcaatgaaatttaacattgtttcatatccaaaaccctcaactaggcatgaagaaacatacctcaaaataataaccatctatcatgaacccacagccaaaatcatactgaatgggcaaaagctggaagcagttttccctgaaaactggaacaagaaaagcattcccactctaaccactcctgttcatcatagtcatggaggtcccagccagagcgtgcaggcaagagaaagaaaagcatcagaaccggaagagaggatgtcaaaccatctctgtagatgaaatgatcataatcccgagtctgtagtttggtgattgacattaatttggaaaaattgtcagtcatcattgctttaaatatttcttcttaacctttctctgttccttctctttcccatgtaataccctaataattgtctcacaattcttggataagctgttctggtttcttatgggtgtgtatttgtgtacttgtatgtttgtgtgtgtatttgtgtgtttactttttaaaaaaaatatttctccattttcagtttgggacattgctactgagatatttttaatttcagatttttttcctcagccatgctgcgtctacatataagtccattgaaagcattgcttaattctgttacaatattcttgatatctacatttttttgctttttaagagtttgcatatttcgacttgcataacacaactgttcctggatgccctctgcttaactcatcacagcccttagcatatgagttatagcggggtcttaaattccttgtttggtaattccaacttacatgacgtagctgagtctcattctaatgcttgttctgtctcattacactgtgatatttttcttttagtatgtctcgtgatttttttagccagaaattatgtaccaggtaaaagaaactgctgtaaagaggcctttagcgatgtcattgtaagatgtggagagaaatgtgttccataatcctacggccatggcttactctagcaagcttaggcctttgaaaataaacccttacatgaaagtgaaaacataagtcttagatttggagaatttgcttgcaaatcaaatatttggaaaatgacttttatcacaaatgtacaaattaccttacaattgaacaacaacaaaaccacacaaattaattttaaaatgggcaaagatctgaatagaaatcgcatctaaaaataaatataaagagatcaacttcattttcattaggtatatgcatgtttaatattcaaaaaatactactatcttatgaggatgggtaaaatacacaatatagataataccaaatggtgatgaggaagttgaaaaacaggaacattcactctttgctggtggtaatgctgaaatggcacatagacatgtacagttaataatttagtgtatattacaaaacagctagaagagaagatttagaattgttaacacaaagaaataatcaatgatggagatgaaagatataccagttatccagatttaatcactgcatataataatcttttatcaaaatatataccccataaagattttgaactcatgtatctatataaattaggtattaaaaaacagcaatgcaggggaatccagctaattgcacattccctgaatgtaccctttcttgtcaaaaaggagttccagagactcttgaaaacgtagtgcagttcatgtgagaaatagaggttcagaaatgcctcattataccctcctccctttggaattcaagcacaactaaccagtatttttcattaaaacagatcttaagactcagaaaacagattctttgcagcagtaagataccaaattctaacctgactcaagaataggatcacatgacagagagcagaccttgaaaagaatcaaagacttttaccctaaaatatatttatttgacatattttaaaatcaccctgcacagttatcttttgagagagaaatttacgttctgtagcgaatctccttccctttccaggtctagttgttagattagctgagagtctagcatcttttaaatgtcatagtagaaaacatttgctatctactgcctctaacggtggccacataagagaattcatctacataataagaatcttgttctccaaaacccgttatcctaacctatgtagggaaaagagagatcagactgttactctatgtagaaaaggaagacgtaagaaactccattttgatctgtaccctgaagaattgttttgccttgagatgctgttaatctgtaacttttgccccaaccttgtgctcacagaaacatatgttgtatggaatcaaagtttaagggatctagggctgtgcaggatgtgccttgttaacaatatgtttacaggcagtatgcttggtaaaagtcatcaccattctccattcttgattaaccaagggtaacaatgcagtgcagaaagccacagggacctctgcccagggaagccgggtattgtccaacatttctccccactgagacagcctaagatatggcctcgtgggatggaaaagacctgaccgtcccccagcctgacaaccgtgaagggtctatgctgaggaggattagtaaaagaggaaggcctctgtctcctgcatgtccctgggaatggaatgtctcggtataaaacccaattgtacatttgttctattctgagataggagaaaaccaccctgtggctggaggtgagacatgttggcagcaatgctcctctgttactctttactacactgagatgttagggtggagagaagcataaatctggcctatgtgcacatccagcgatagtaccttcccttgaacttatttgtgacacagattcctttgctcacacgttttcttgctgcccttctccccactatcaccctgttctgccacattccccttgctgagatagtgaaaataataatcaataaatactgagggaactcagagaccggtgccggtgtgggtcctccgtatgctgagcaacggtcccctgtgcctactgttctttctctatacttggtctctgtgtcttatttcttttctcagtctctcatcccacctgacgagaaatacccacagttgtggagggggtgggccccttcaaacacagaaacgtttttctactgatttcagctctttaaataaaaagttaagtctttcaatcagaaaatctttgaattcacctgtaagctgtaatcccctccccacactgcctcacttgtagctcttttatctttatgaaacaaatcgacacatgtctcatatgtattgactgatgtctttctctctaagacattaaatttaagctgcaatcaagccactttgggcacacgttctcaagatcttctggggctgtgtcacagggcatggtcctcacatttggctcgaataaatctaaatattttgcaaagttgactttttcattaatagttcttacagaacctactctgtgctctttgttacaagcataaaatcaatatagtattagttataatagtattgggtataccacatattggcaatttcttatgaagttaggcatagactaacaatgggatcaagtgtaaatgttttaatgtatttatgcaagttattttgatatttatgttctgcagatacttctatcagatttattatatcagctaattatttgttttatgattgggtgcattttttatagatgataacaccatatcttttctaggcctttattggagaaaattgtgtgaaactactcaggactacatgtgaaagtccttattggagtggctgacagaattgaagtacatttcctctgtagccaccagacacccagattcctccagtaacaccttaattttgtttcctgcttggctttggtcttcagtcttgtgctatccagagagactctgtcttacaaatcccccaggtcattctaaagccacatggaccggacaattgtcaatgtggtgggaagggtcgcactgaacggtcactctctgtccttctgagggagccatactgcaggcagacatggcagtcctggctcaggttgtgtccttccaagtatccctgccctcctgcaggtgtgatgctgatccatgcatcttcctcccattcctgggtagagggtctccttgttttttcccagatcttcttccagcagccactatgtcttcccactgatgtcttcagcttcctcttttctgcccttcccagcaggatgaggcttttattcctgaagaaagagagaggaggtgggagatgaggctgttattcctgagagaatgaacagggctttggagcttttctttcttctatcccagtttctatgagttcctccagtaccagtaacacaaaggtgttactggctttgcccctgcatgttaattctctagcaatgtagtggtgacagtggaggtgggtctggatgcatttcagctgcagttgctgtttttctttccagcacagaaccaacttgggagctacagggcaagagctttttgtaatgtgtcctcaatcctgggagaaaagttttcaatagcaataggaatctctcagttgtatgttctctgagaatttaaacaataacttatttattatactcaattttaaacaatgtaataaatatgtctaatttaatcttgcattagcttatgtgacatttgctggccattgccccagataaggccattttctcttcctgtttatccctgcaagtgactgacttttgcaagatgtaaggtttcttgtttgccctataacatcaataatctgaaatattaaagaaaatgtgctaatttgcagatcagtaaggttagttgtttctgtaaaaatatatatgtttttttgagatggagtcttgctctgtcaccatgctggagtgcagtcgtgtgaacttggctcactgcaacctccgcccccttggttcaagcgattctcctgcatcagcctccatagtagctgggactacaggagtcttggcctccaaaagtgctgggatttctggcataagccatcacacccagccaaaaataatatattttaaggggtgcatacatctccaggctgagtaggagctttatttgtagtactcagtaactggaattaacacaactattaaggagcattataaataaatagtaagggtgcactcattaactggaatactgttcctcattagaatcaacacatcctttagttcatgtcctttgcagggacatggatgaagctggaaaccatcatagtcagaaaactatcacagggacaggaaaccaaacaccgcatgttctcactcataagtgggatcttaacagtgagaacacatggacacagggaggggaatgtcacacaccagggcctgtcggggtggggagcaaggggagggacagcattaggagaaatacctaatgtagatgacaggttgatgagtgcagcaaaccagcatggcacatgtatatctatgtaacaaacctgcatgttctccacatgcatctcagaacttaaagtataattttaaaaacacattatttatatagaaccaaattactggctcacaagtaattatactgtgcaaaaaaccacacaaatgaaattgagactataagatttcacttgaacaaaatcttgaaaaatagatctaaagtaacaaagatgactgactcaatatggtgagaggaaaatgactgggaggcaggaatgagaggaacacagggaaacttttaagtgtaattcattggtatcttgattgttatttgggatgcacaggtgagcacatgtgtaattacatttttttcctttggagacattttcttgctttgtcatccaggctggagctccgtggtgacatcatagctctctgcagcctcagaccctgggtctccagcaatcctcctccctctgccctatctagctgggactacagctgtgcaccaccatgctcggcttcagtgtgtattcaaccagacactttaattatgcagtatttattacgtggcaataatgcctcaataagggtattgcaaataagtggatggataatttgttcaattaagattgatggaaatatagacacttacatgacaaatgtatgacaatcaagaaaataaaactgtaggaaacatactttactttttgttaggtaatcgcaacagtgcatacacatcacaccatgttctcattacagagaaaaggttctgcaaacctcacttggtgtgacctcctgtatgctgggcttggctcagggagaagtcaggaccagtggtgagaagcacaggcccagataaccagactcactctgaccaaatgtgagtgctggggacattgtacaatccatctgtgttttgctgatattttttcatctgtaacgtggaaataacattgatactacataccatggtttctgtgcatatggaaaaataaaagatgattggtgcaaactttaaatacacacagtttatgtagatcaattgtacctcaataaaactgttttaaaataaaaattacaaaactataagttttataggttttaagggtttatcatagaacaaacttacaataagaaacaagaatttccaaatgctatcaatatcacaaatctcccccaggacgctctgacatgctctgagccccactctctcctcaggcgtcccatcccagagcttggcatgtagtaggagacatgcaaatagagccctccctctgcttatgaaaaccagcccagccctgaccctgcagctgtgggagaggagccccagccctgggattttcaggtgctttcattttgtgatcaggactgaacacagaggattcaccatggagtcatggctgagctgggtttttcttgccgctattttaaaaggtaattcattgagaactattgaaattgagtgtgagtggataagagtgagataaacagtggatacgtgtggcagtttctgaccagggtttctttgtgtttgcaggtgtccagtgtgaggtgcagctggtggagtctgggggaggcttggtccagcctggggggtccctgagactctcctgtgcagcctcaggattctcctttagtagctatggcatgagctgggtccgccaggctccagggaaggggctggagtgagtggcacatatctggaatgatggaagtcagaaatactatgcagactctgtgaagggccgattcacaatctccgagacaattctaagagcatgctctatctgcaaatggacagtctgaaagctaaggacacggccatgtattactgtaccagacacagtgagaggaagtccgtgtgagcccagacacaaacctccctgcaggggcacgcggggccaccagagggtgcccaggatcccctgaagacagggacagcccaaaggcaggtgcagatggatgtcaagagggtctgtggcttcgtctacatctaactgtttcctggtgagcctctgtatatttatttttctgtgcccactaatgaggttggtaagtttaaacacttttttttttgagatgaagtctcgtgcttgtgccccaggctggagtgcaatggcatgatctcagctcactgcaacatccgcctcatgaattcaagcgattttcctgcctcagcctcccaagtagctgggattccagacaactgccaccacgcccggctaatttttgtatttttagtagagacaggctttcaccatgttggccaggctagtctcgaactcctgacctcaggagaccctcccaccttgggctcccaaagtgctgggattacaggcatgagccactgtgcctagccaaaaaagacttcattattataggaggaaaaattctcatctgcaagtgtcactgatggaagcagaaaaaatgcccaggaagtcaggtgaggctgtagacactgtcaacccaggatgcaaatctcaccacaagtgcaggagaaagggcagggggttgatggatcatcctaactaacgtatggtttaagctgagcccagcaagaccctcagtgcctccctaaccacagttgcccttcagggataacccatgtgctcaacagcagccacaccttagtatctccactgtgcagtcattgtctaggacaagctcccaggatgtggggctttggcacaaaccaggtcatggatgtcagagaggggcagctgggtgtctggtccataggctccctgatgttggagggttgagaggtgcattctctgggccaacatatactctagggatatttacttcagaacacataattttatttgttggtttatggttaatggggtattcatcccttcaatcatttgtcctttgatttacaaaaacattccaatttcactttggaagtaattttattatgtgcaattaagtcattattgattatagtcacactattttgctactaaatagtaggtgttattcattctttctaactctgtattttgtacccattaaccatatccacctgttctctggcccccactagcctcccagactccagttaccatccttctaccatccgtgttcctgagtttaattctgttgatttttagagcacacacataagtaagaacctgcaatgctttttttttcagtgcctggtctttttcacttaacatagtgacctccagttccatccatgttgttgcaaatgactggatctcatggaatacctaattttattcggttctttcatatgacatagagaagcaagcatgcagtctacaaacaactgtaattttcacatttaccccaaatgaattattacttatttctgtgcagggtccaggcacatagtagcctttctcttgagggactgttaaatttagagtgagatcacttgtttctcatattatatgattcctgtccatgtgcagagatcttaagtaatctgcttctttctgcacactaactctgaccttctcgacaaaaagagtagagattttcatgtttcctgagtctggggtaggagttagtcctacacaactcagagcctgcagagacctcccagtgcagttttatagacacaggtgctttctcatggggggtgagacctccacttcctgtgattgctgctcagatctaactgtgatttcagatttaggacaccattaggctctcaaaccatttctattctaaaaatcagcctcatcatagaaaatggaaataattcaatatccatttccctgaccgtatttcatccttgtttttaatttggtgcaagtttattacatatttgcctgaatctaacttcagaatcaactgaattggtctagaaatctcaaaaattgaacagaagtgggttttattatttttaccaaaatgtgtgtaggtagggtttccaatgtatcatccagaacttgtgcatgctaacaactgtttttctcagtcaattatcagcctggtgaagcccttgcaaaccccctcactcacctgtgctgcctctggattctctgtcacaatcagtgcttcctgtaggcactggatggaaagcacaggagtgggtcaggtgcatacgtgatgagtggaggatgaattccagcccacttatcatgaattcagacaagcccacatgttcccacatgcactatatcttcagacaagcagatgtgtctgcacatgaattcttctttcagacaaacacgtctgtcccctcatggactcttgccacacacaagcacacgtggcttcttgtggactgtactttcagacaagcacacattgtttcatgtggacatcttcctcccacaaatgcattttcccctgagtagactcttctcccacaagcccatatgtcctcacatggacatttctcacaggcaaacacccatttccccatgtagtcccttccctcagacaagcacacgtattcccaggtagactcttcccttagacaagcacagctgttcccatatgaacccttccatatgacaagcacacatgttcccatgtgaactcccgtataacaagcacacatatttcctcacgggctcatcactcagataggtctgcatgtccacatgtggactctactctcagacaagcccacaggtcctcacatggactcttctctcaaacacccgttctccattgtagactcttcccttagacaagcacgcattttcccatgtgaactcttctgcatgggaagcacacatattcccacagggactcttctctgaaacacccattctccattgtagactcttcccttagacaagcacgcattttcccatgtgaactcttccgcatggaaagcacacatattcccacagggattcttcactaagacaagcatgattgtctccactgtgacccttccctcagagaagtacacttgtctacatatggactcttctctcagacaagcaaacatgtccccacgtggactctttcttctgacaagcacacgtgtccccatgttgttataatcattttctcacctctgtctcacaaagttgccctgtcctccaagaataattttgacctctcacttctcattcacactatggtgattggtgcgcagcattttcacccaagagaaatgcaggcagctctcagaatttattgtgatggaggcaggaagacaaacacaaagataaaacttgtcgctaccttgctgggctgtgttctgtgcagagtctctgaaggctgccctggggctgtgtcctaagctgtatctctctgattccactaggagaatgcacatagagaaattcaagctgaatggtgtcctgatccctgcctcattctgctattcttccctattcctcagaaattcacccaacattgccctctgtcttgtattgtctacattctcacagactctctcatagaacttcagcttcaatggtcagagccctggtcacttcttcccaactctccgcacatgccaagtgcacattagagactcaataatgaggctcaccaggggcagtagtagtttcatctatcacagtggagatgaaaatccatgatttaaaataggtttctaaaaaagaaaatatgtctcacatcaaacacaaatgagagaatgcaacggcataattcattttcaggtttttcatatgtaaatctcctaaagtacataatttagtttttagtgtggttcctgatccatgaatccttttgccttcttcattatctttcattcaaacaaacagagaccatacccactgttcacagtgtagcctcatggagaacatcttcaccagtcagcccagtcagtgagtgaggcctttaaatccttcatgctaattcaaatttctggctttattcttagtagaccccaggttttcggggatgttgggttgtgccagcactcctaaataagggagatagaaattatttcctcaggcatcctcttgcaacatttggacaattgcccatagtttgattattgaggtgtgatgcatcaaaataatgttagttcaatcttctctcaaccagtcattgaacattgaaattttgtaattatttatttggatatctctgaagtttacctcttgaatatttaggtcatattataaatagtttaagctgcctactaggtaaaatgatctgctgcagaattttgacttccttgctgtgcatttttgcatttaaattgaagtttctattactcgtgtgtctagaatgtaaaaatacgtcttacattttctcgaatttttcatttcactggagtttccagaagatgagaaaacctcccttgtgtataaaatacctggtaacacattgctcaatagtttcgttgctgagaccagctcagtcgggagaccctaacccagcggtgctagaggaattaaagacacacacagaaatatagaggtgtgaagtgggaaatcaggggtctcacagccttcagagctgagagccctgaagaaagatttacccacgtatttattaacagcaagccagccattaatattgtttctatagatattaaattaactaaaagtatcccttatgggaaatgaagggatggaccgaattaaagggggtgggtctggctagttatctgcagcaggaacatgccctaaggcacagatcactcatgctattgtttgtggtttaagaacgcctttaagcggttttctgccctgggggggccaggtgttccttgccctcattccggtaaacccacaaccttccagcgtgggcattatggccatcatgaacatgtcacagtgctgcagatattttgtttgtggccagttttggggccagtttatggccagattttggggggcctgttcccaacatttcctctttaatttttttctcctctcatattgtactgttataagcaatgagatatcaggacacatcatcaacactttgctaagaaatatcttcagctaaattcccagagtatcatatactaatcctaattttaactaaggtaacataattaagatacattctataacaagtcacacatattatccagtatccagtaacatgtttgtgacagaaacaaagcaggtgcttcctctgcaaagggtcatctgaggtctgagttgagggtcacacaggtatttttctggtttacaagggtgggaacgacaacagtaataacgactctgaacagcactggcccttccttgaaaggttgcaggtaaagctactgctgctatatcaaattaacaccttactagaataaagcccagagggagggtccacatgctaggtcacagagtgaggagaaatggagctgtgctctgctctccacactacctacaagatcccagacacacgcccaggttccactgatgcaaggcatctacagtgcagttctaaggcacctgcttcctggggcagggagcatcctcctgtcaattgcgcacctgctccttctgcaagctattaagtgagcacttctattgccatgaattatacatgttctctctcttaacatgtatattgaacatgcttacttacattgcattttatttttctctgaaatacactggatgagcagaagaaaataaatcacacccctgatgctttccacacatacaaagattcctgaaggcagagctgactgatatcctcaccagtagaccactgcctttcagagatgatcttggtattcaagttccagcaattcttgaagttaaagggcacctctatctcctctccactgctttgcacctcacctgatatcagctttctcattagaatgccttgtgtttaaggaatgagagttcctgtcacaggtgcaaaggcccaggttctcccactggctccagtccagggctagggacacctgtaagaccatgatatcatctgatacataacctttacatcataagctttacataacctttacatacataacatcacacatagcattcatgatacacacatcagatcacctttacatgctctaacatgtaaagattaggaaagtcatcaagctcattcttatgtcaaaaaacatctgcacaatttgaacatcaacaatttttgaaatctatcaaggaattgaaattgcaagggaaattacccattccaaatactgaagatacagacatgtccaggatcagagttgacactggctgaactggaaaagaacttgaagaaagcacgagttggtgagagcacacacatggtaaatgctatgaaagcctaaacggcagatgtggactagggtgagattcctggggacctacactccatagtcttctgaactttccttcaaaatcttccagattctcaggtatacaatccaaataatttttttatgggtctgaattggggaggattaattactgagaaatgtaccaagagccttctaaaaaaaaaaaatcctataggaaatgagattttccagaacctggaggaacctacagttccctaaagacagacactgaggagaataaatctcgacagcgccgcctggaggtggaggtgaagagcttcctggaggagctggaccggaagatccacgacctgaatgactcccgcccaggcctcccaagctgggcaccgacaactagggctggtggaggcccgggatccccaccgtgagtcccaagcatgtgtgcgagaccagatggcgctaggacgttccctgtgtgcgttgcttctgtaaatgcagacgcagtttgtcgtgtttccaaaccagttgtgctgtccactcgctcctttccagagtagaaatctcctctccgccgggcgcggtggctcacgcctgtaatcccagcattttgggaggtcgaggcgggcggatcacgagatcaggagatcgagaccatcctggctaacacggtgaaaccctgtctctactaaaaatacaaaaaattagccaggcgtggtggcaggtgcctacagtcccagctactccgaggctatggcagtagaatcgcttgaacccgggaggcggaggttgcagtgagccgagatcattccactgcactccagcctgggcgacagaacaagattctgtctcattaaaaaaaaaaaaaaataggcttcaggaagtagctcctagatgggcagaatcggtttaaccctctgtgtccacaggatctggagcctctctctccttagattaggccacctcctcaggattacagggctcttcagttttctcaacatgctgttgttgccccaaataaacacaaaagcactttattttcttatgcttacctttaatttttcaaaacaacataaaggtgataattttaacaataaacatattacaacctactatacatgatacccttcctgtagttcgaggtttattctcaggaatttatatgtattacttattttcaattgctttctgatatgggatgtcaatgccactttactacagtctttattcttttaagttatctctaaaatctctaaaaattaatctttccaaagcaccactcaaaaccagtgtattattagaacttgtgggtgtaatcgttggaccaatattaagaataaattcttaatggactaactcagatataaaatttctgtccttcctctctctctacatatatacataacgactttgaggtttcagttgaatcagtccattcattgaatgtatgacaataggttgatctaattgtatacgttaaatagcatgaagaaacctcaacaatagcaaaagtagccccttaccaaaaacagctctattatgttagattccacttatgagaagttcaaaagagaaaaacatggatctgtattgtcagaaatctaaacatttccccacacaggagctgaccacaggcacaggaagacctgtgttgggggatggactgctcttcagtctaccttaggtgccggggacaagagtattcacgtttggcagaaactctctagtgagaaattccagatctatgcatttcctcttatatgtaaattttctcataaaaacaaaaaataatgtataaaataatttaaaattcagaacataataaaaatgacattacatgcctatccaaaacattcagtaatgaacattattatatgaattaataaaatccattcaaatatacctactgaaattaacttctggaaaataaaaagacaagggtaacatccgtaacttaaaaattaataagcatatatttcatagagaagaaaaaggtagtcaagacatatgtggaatgtgtattcttttttccaatcaaatgtcattaaactatttaaacaattttttaacctgtgtcataagtatagattactaatatttgtctgatattacaactgtgaacaagttttaaagaaaaaaggatatttgacagcatgtgaactaaattgaatttattcttaatattgagtccaacgattacacccacaagttctaataataccctggttttgagtggtgctttggaaaaattaatttttagagattttagagataacttaaaagaataaagaatgtaataaagtgacattgacatcccatacataacaacatattgatctattttttgttgatggactttaaatttgtttctagtttatgaatattataagcaaagctgttacaaataccttagtgtaagttttcctatgttgtctcatttttattgcgaaaacatgacgtatgcatttctttcttgtaagagtaattttaacttttttcagtttcattgaggtatatttgaaaaaattttttaaaagtatatggttgaggaacaatgcaccacttgatgctttgtcttaggccattctcacattgctataaagaaatgcctgagactaatttgaaaaaaagaaaaagatgtttaattggctcatgattctgcaggctctataggaaatgtagttgtttattcttctggggagactcaggaaagttagaatcatggcagaagacaaagaggagcagggcaatcacatggccagagcaggagccacaggaggcgtgcggtgggggggtgcggggcgggtctacacaccgttagacaccagatcttgtgagaactcacgcactgtcatgagaacagcagcaggagttgttgctaaaccattcatgaaagacgtaccccatgacccagtcatgtcccaacaggtcctactttcaggaatgaggattataatataacatgagatttgggtcaagatacggatccaaaccatatcagatacacattgtaaaatgatcatcgtagtcaaggtaatttgtgtgtatatcatctcacagagctacaattttatttttttaagtttactgcatgtgtgtgtgtgtctgatgagaacaactaaaatctaccctgttagcaaaaatcgtttttacagtaaagtattaactataggaacat

SEQ ID NO: 32 - DNA, 200000 bp, Human
tgctgtacattagatttccagaactcattcaccctgcacaactgaaactctgtaccctttgacaaacatcacccaaattccctctcctcccaggtcctgacaccctctagtctactctctgcttttaagaccttggatattttagatcccacacgtaaatgagatcatgaagcatttgtctttctgcatctggcttattccactcagcatcatgtcctccaggtccatccacgttattgcaaatgtcagaatttccttcttttcaaagcgtcataaatttagttttatgtatacacattttatttatacatttatcaatgtatggcccttaaattagtttacaaatctacactattattaataatcttgcaatgaacatgtcttttgcataataattttatttccttttaatatataacaagaagtggaatcactagatcataagatagttttattttcaatttgttgagtaaccaatcctaccacatcatataaggattcctttttctccacattgttgccaacatttttaaagttttgtcttgctgataatagccattttaactgctttgaagtggtatatcattgtgctttttatttgaattcccctgataattaggaatattgagaaacttttcattttccgtttgccatgtgtgtgtcttctgaaaaaaaatctatccagaattttgccttttttaatcaggtcacttgttatttgttattgagttgtatggcttatttatatattttgtttgaacttcttgtcagatatataattacgcatagtttttcctgtgttttggtattaaattcaaataaatcagttctgagtcaatgacaggaagttttttctttttccatgttgtctatgagtttatggtttcaggtattatgttcatttttagttgatttttatatcatgttaaaggaggcctaattttatttctttttatatggatgcccagtttttacatcattattgaaaagactgtcctttctctactgtgtgttcttggcacactccatcaggaagagacataatgaaaaaagtatataagatgaatattcctgatgaacatagatctaaaagtcctcaacaaaatactagcaaatagaatccagaagcactttaaaatgtaatacatcatgatcaaatgggatttaccctgggatgcaaggttcattcaacatccacaaatcagtaactgtgattcgccatgtgagcagaataaaagcaaaaaacataggattatctcaatagatcctgcgaaagcatttgataggatccaacatccactcgtcataaaaaccttcaacagactaggcatcaaaacatacctcaaaataataagagccatctgtgacaaactcagtaaacatcatgctaaatgagcaaaagctcaaacaccttgagaactggaacaagagaaggatactgtctctcactactcctattcaatataacactataaatcctagttagaacaatcaggcaggagcaaaaatgaaaggcagctgatgtggttttgatttgtgtccccacccaaatctcatgtctaactgtaatccccagtgttggaggtggggcctggtgaaaggtgattcgatcatggggttgtgttttcctctctcacgctgttctggtgacagagctctcaggagatctggtttcaaagtgtgtggcacctcccccttgtctcttcctcctgctcctgccatgtaagacatgatgcttccctttctgtcatgattgtcaggatcctgatgcctccccagccatgcttcctgtacaactcgcagaaccatgagcaattaaaactcttttctttataaattacctagtctcaggtgtttatagtctgagatggactaacacagcatccaaacaggaaaataattcaatccatctgtcttcactgatgatacaattctatgcctagaaaatcccccaaagtaattctagaatagataaataactttagtaaagtgtaaggatgcaaaatcaatgtacaaaaatcaccagcatttctatatcccaaccacatccatgctgagaataaaatcaagaacacagtcctatcccatgtacaatatcttcaaagaaaatgacatgcttaggaatgcaggtaacaaacaagatgaaagatctcttcaaggagaacaacaaaacactgcagaaataaatcataaatgacacaaataaatggaaaaaaacatttcatgctcctggattggaggaatcaatattgccaaaatggtcatactgcccaaagtaatttgcagattcgatgttatttccatcaaattattaccatcattcttcacagaattaaaaaacccatacatattctaaaatatatatggaaccaagaaagaccctgaatagccaaagcaatcctaaacaaaaagatcaatgccagaggcatcatgctaccagatttaacattacaaagtaagaaaaacagcttggtactggtgcaagagcagacacacagaaaaaaaaaagaacaaaacagaaaacagaaatagagctacacacctaaaccatttgacatttgataaggttgacaagaatcaagccatagattaaaaaaaaaaaactccgtattcagtaaatagtgctgggagacctggattcgggcagatatgcagaatgcaacagtgaaggaggctgggcagtttctaccttgatttcagatgtgcagagagccctatgtgcccaggaaaaagcttgctgcaggagtggagccaccacagagagcctctactagggcagtgccaaagatgtggaaagatggggttggagcccccattcaaagtccacactggggcactacatagtggaactgtgggaatgtggccacagatctcaagactgcagaatggtagatccatgggcaacttgcaccctcagcctagaaaagcttacagcacttgactctgactcatgaatggagccccaaggactgcgcccagcaaaactacagtgatgggctgcctgaggttttggggagccaacccttgtcccactgtgccctggttgaattacataaatttgagagaggttattctgtaactttaagatttaatatctgctctactgggttatatgtgtgtgtgggggggggggagcgctgttggccattcctttggccaatttatttattttggattggaataatttacccaatgcctgtaccataattgtaccttggaatacacaacatttgcaatgtttttttttttaattttgcaagctcacagatggagggaaattgccttaagactcagatgagactttagacatttgagttggaggctgaccaagttaagactttttgttattttagtattattatactttaagttttagggtacgtgtgcacaatgtgcaggtttgttacatatttatacatgtgccatgttggtgtgctgcacccattaactcatcatttagcattaggtatatctcttaatgctatccctcccccatccccccaccccacaacagtccctggtgtgtgatgttcccattcctgtgtccatgtgttctcattgttcaattcccacctatgagtgagaacacgcggtgtttggtttgttgtccttgcgatagtttgctgagaatgatggtttccagcttcatccatgtccctacaaatgacatgaactcatcattttttatggctgcatagtattccatggtgtatatgtgccacattttctcaatccagtctatcattgtttgacatttgggttggttccaagtctttgctattgtgaatagtgccacaataaacatacgtgtgcatgtgtctttatagcagcatgatttataatcctttgggtatatacccagtaatgggatggctgggtcaaatggtatttctagttctagatccctgaggaatcgccacactcccttccacaatggttgaactagtttacagtcccaccaacagtgtaaaagtgttcctatttctccacatcctctccagcacctgttgcttcctgactttttaatgatcgccattctaactggtgtgagatggtatctcattgtggttttgatttgcatttctctgatggccagtgatgatgagcattttttcatgtgtcttttggctgcataaatgtcttcttttgagaagtgtctgttcatgtcctttgcccactttttgatggggttatttgtttttttcttgtaaatttgtttgagttcattgtagattctggatattagccatttgtcagatgagtaggttgcaaaaattttgtcccattctgtaggttgcctgttcactctgatggtaatttctttcactctgcagaagctctttagtttaattagatcccatttgtcaattttcgcttttgttgccattgcttttggtgttttagacatgaagtccttgcccatgcctatgtcctgaatggtattgcctaggttttcttctagggtttttatggttttaggtctaacatttaagtctttaatccatcttgaattaatttttgtataaggtgtaaggaagggatccagtttcacctttctacatatggctagccagttttcccagcaccatttattaaatagggaatcctttccccattgcttgtttttgtcaggtttgtcaaagatcagatagttatagatatgcggcattatttctgagggttctgttctgttccattggtctacatctctgttttggtaccagtaccattctgttttggttactgtagccttgtagtatagtttgaagtcaggtagcatgatgcctccagctttgttcttttggtttaggattgacttggcaatgcaggctcttttttggttccatacgaactttaaagtagttttttccaattctgtgaagaaagtcattggtagcttgatggggatggcattgaatctgtaaattaccttgggcagtatggccattttcacgatattgattcttcctacccacgagcatgcaatgttcttccatttgtttgtatcctctttaatttcattgagcagtcgtttgtagttctccttgaagagatccttcacatcccttgtaaattggattcctaggtattttattctctttgaagcaattgtgaatgggagttcactcatgatttggctctctgtttgtctgttattggtgtataagaacgcttgtgatttttgcatattgattttgtatcccgagactttgctgaagttgcttatcagcttaaggagattttgggctgagataatggggttttctagatatacaatcatgtcatctccaaacaggaacaatttgacttcctcttttcctaattaaatatcctttatttccttctcctgcctgactgccctggccagaacttccaacactatgttgaataggagtggtgagagagggcatccctgtcttgtgccagttttcaaagggaatacttccagtttttgtccattcagtatgatattggctgtggctttgtcatagacagctcttattatgttgagatacatcccatcaatacctaatttattgagagtttttagcatgaagtgttgttgaattttgtcaaaggcgttttctgcatgtattgagataatcatgtggtttttgtctttggttctgtttatatgctggattacatttattgattttcgtatgttgaaccagccttgcatcccagggatgaagcccacttgatcgtggtggataagctttttgatgtgctgctggattcggtttgccagtattttattgaggatttttgcatcgatgttcatcaaggatattggtctaaaattctctttttttgttttgtctctgccaggctttggtatcaggatgatgctggcctcataaaatgagttagggaggattccctctttttctattgattggaatagtttcagaaggaatggtaccaactcctccttgtacctctggtagaattcagctgtgaatccgtctggtcctggactttttttgtttggtaagctattaattattgccccaatttcagagcctgttattggtctattcagagattcagcttcttcctggtttagtcttgggagagtatatgtgtccaggaatttatccatatcttctagattttctagtttatttgcgtagaggtgtttatagtattctctgatggtagtttgtatttctctgggatcggtggtgataccccctttatcattttttattgcatctatttgattcttctctcttttcttctttattagtcttgctagtggtctatcaattttggtggtcttttcaaaaaaccagctcctggattcactgattttttgaagggttttttgggtctctatttccttcagttctgctctgatcttagttatttcttgccttctgctagcttttgaatgtttgctcttgcttctctactgaaaaaagatgatcatattttgcaatgcaaggacatgagaattttgggctcgagagtgcaatgatatagtttagatgttttcccttccaaatgtcatggtgaaatgtgattctcaatgttggaggtgggaccgactgggaggttttgggtcatggggaaagatccttcaggaatggcttgggaaccaccccatggcacttagtgaattcttgctgtgttagctactatgagatctgattgttaaaaagagtctggcaacccttcttgccactcatgtcccagctctcaccatgtgacatagcctgttccccctttggcttccatcatgattgtaaagtagatcctggtgccatgcttctcacacagccttcagaactgtaagccaaatgtgcctcttttctttgtaaatcacttggcctcaggtattaatttataggaatgcaaaagagactaacacaccgtccaaagcattacacagattcaactctatttttatcaaatgaccaatataattgattacatatttagaaaaaaaatactaaaattcctatagaatcaaaaaagagtctgaatagcaaaagcaatcctaagcaaaaagaccgaagctggaagcaccacattctctgacctcaaattatactacatgaatataataagaaagacagcatgctactagtagaaaaaaatagcccagaaagaaagccaaatatctaaaaccaactgttgtttgacaaaactgacaaaaatatacactggagaaacaaccctctattcaataagtggtgccgggaaaattaggtggcttatgtggaagaatagaactagacttccatatcaccgtagacacaaattaactgaatatggattcagtgtttaaatttataaactaaaactataaaaatacttgaataaaatctaaaaagagtcctctggacattggtctaagcaaacaatatatgactaagacttcaaaagcaaatgcaataaaaacagaagtagacaaacaggatttagttgaactaaaggtcttctgcacagcaaaagaaataaccaacatggtgaccagacaatctgcaaatggaaaaaatatctggaatctattcatcttgcaaagggctaatatatagaatctacaagtaactcaaataagtcaactaaaaattacaaataacttcattaaagaatagacataaacagacatttatcaaaagaatacacagaagtggccaacacaaataagaaaatatactcagcatcaccaatcatctgataaatgtaaattagaaacaacatgatacggcatcttccaccagtcagaatggctgttattacaaataaaaacagcaggtgtttgcagacaaacataggaaaaataatgatttatatatgcttggtgagaatgtaaattagtacaacctccatgaaaaacaacatagaaatttctcaaagaactaaaattagaattaccatttcttccagtaagctgtcccagtaggcatgttcctcccaaacttttatatcagagaatgttgcctgcactcatatgtttatttcaacaccattttcaatagaaaagtcaaataatctaagtgtcaatcagtggatgattagataaaatatgatatatgtaaatcatggaatactatgcagccagtatggtatgaattcagtgtgaccagcccctggacaagggcttgagtggatgggatggatcatcacctacactgggaacccaacatataccaacggcttcacaggacggtttctattctccatggacacctctgtcagcatggcgtatctgaagatcagcagcctaaaggctgaggacacggccgtgtatgactgtatgagagacacagtgtggaaacccacatcccgagggagtcagaaaccccgagggaggaggcagctgtgctgagctgaggcagtggtgcagcagtttctttaacttccatatgatctcattttgcatcatcttctacttttatattagctaagaacttggggtagacaggtgctcctaagagatccttaacttgcccattttgatggttttccagaagacgtgagaagccactttgttagcaaagcatcccaaatccatgccctgttctagatacatgtgagcccatttcctggtctttgcttaactgacaagctctcatcagtgcacctgggctaatttcacatcaggtagaggaacgcgttataaaggaaagctaatgttgtaatagcaattcctgcttaaaaaccttcagcttcattgtttttgtgtaatccatcagcaaattatgttagttcaaggttctcaatgggagtttctaataaatagaaaggatgtataaagcttcccctaattaaaatgaaacaattgtgaacacaacctcggtattcagccatgtctccacccttcacacccttcgccacaaaggaattttcacctctcctggaagctgggttcattttcaaattagttatttttttcaatgtaatatctcaagattatcgtatatgactattttagcagaaagtgaattatgggaacttgaactaaacaactgaaaacaaattcacaactaattaaacaagatgccagaatgtgattggctccagggtttgtaattcagcagttcatgtacccagactggaaatttacatgtcttcttgttaccttcacagcacagtcaactcccattatgtaagaaatggtgactgcattcccaagggttatgcatagatatgaaaatagactgggtaaggtgaggagttgattgtttaaattcccctctgaagaagcagcatcaactcaacaaaccacctctcttcactctgtgactagagctatgtcacaggccacatggacctaaatccttgatggatataacatgactacataaattgggctgatcatttttatgctataaaattaatagatgacactgcactccagcctgcacaaccaagcaagtcttcatctgtaaaatctaaaaaagaaaaattaataggtactgacttcgaaatttttgataataatattttcaccacccaaatttaatcacacccacatgttacctgcatcttcactgaaaagttcccagtcacgatgagttccttcaatgctccatgtgttcaaatctggacatcaagagagtccagagaataaaacacaatgacggcagtgaaactgatatatattcagcacctcttaactcaggaggactccatacaccctggcacacaggtgcttttctaaatggctcacaatgactccagctcactcacagagctcagacagaaacctcccttcagggtgggagctgggtggcagggggcactcagtacccgcagaggtgaaaatgagcttcagatggaacttccctgtcacctcaacatggaatttattgtttcatttcattacctctctttccataatggttcatttcttttggcctgttcattactgatatttttcagagcaatctcacttgaatctttactcttttggattttgtctccttgacaatgttgggaagttttacctccagcatcataacatgatctagtgatctgacacattgtgcaaacaatacctacaaattcagaacctctttgtttttctttccacaaaatataattctttctgttctgtgtatgagcatgtcttagcaaccctgtacacacccacatagatgtctacaagcctatgaattgttctctgtaaataaaaatttatctcaaattccttcaatgttcataattctgagagtgaggaaggtccttctcaatctgttcaaacaaaatgcccagagaccatccagtaggtaaggagttcacctggctctggtgtggggtctgtctctttccctctgttgtcccacaggtcagcccagttgttcacgtcctaacaagaaagcccaggtttgtcctgattttaaaacacatcaaacttctgatgactctcctgttacccacatccatggagatagattatttattatataattcagcaaactaatgtcaaatgcccaagttgcaataccgcacatcctagggtatgttcatgcaattcaatggaggagaaaatctttcagagacagatggatctgaaatgataaatatgtgggtaaggactctgggcttgagtatcattgtccagccatgtttcacaagtgtgtcctgtcagggaaggatcagagttccttgtgctctcagagggaaggggtcacagagttcctctctggttcccaggaaaggtaatcgcactaatcttcatgatcttcatgagactatcctccagtgctgacctgttacggagtttttgtctgaagttctcactgtaatccccaatctacatattttcaatcagaagtgtttagagggcaggacacatcttcaaggtcacacattgagaagtatggagatatgtcccactaccttctcctacgatctcagacagaatcccaaatttcaaaaggacacagaaggacagctctcaggtgcttttaaaaaatgacccacttccagggacagtgagcttccctgtaaccatggtggatgttctgaactacaataaacattggatggatccagtattgtttgaagtcactgtcattattacattcagctgttgtttcaatgtgtctgaaagggtaaatgactatttagatggcctgggtgtgtggtgggttttatatgaatctttaagggttgaacagtactgaccctattccaaaatctgtccttgatccaggatcacactcatctctcagaccagctccttcagcacatctctttacctggaagaagaggactctgggcttggagaggggaggcccaagaagagaactgagttctcaaagggcacagccagcattctcctcccagggtgagctcaaaagactggcgcctctctcatcccttttcactgctccgtacaaacgcaccacccccatgcaaatcctcacttaggcgcccacaggaagccaccacacatttccttaaattcaggtccaactcataagggaaatgctttctgagagtcatggatctcatgtgcaagaaaatgaagcacctgtggttcttcctcctgctggtggcggctcccagatgtgagtgtttctaggatgcagacatggagatatgggaggctgcctctgatcccagggctcactgtgggtttttctgttcacaggggtcctgtcccagctgcagctgcaggagtcgggcccaggactggtgaagccttcggagaccctgtccctcacctgcactgtctctggtggctccatcagcagtagtagttactactggggctggatccgccagcccccagggaaggggctggagtggattgggagtatctattatagtgggagcacctactacaacccgtccctcaagagtcgagtcaccatatccgtagacacgtccaagaaccagttctccctgaagctgagctctgtgaccgccgcagacacggctgtgtattactgtgcgagacacacagtgaggggaggtgagtgtgagcccagacaaaaacctccctgcagggaggctgagggggcggtcgcaggtgcagctcagggccagcagggggcgtgcggagctcacggaatacaaggccgggtcaggagcaggtgcagggtgagcggggcttgctcatcttctcagtcgtctccctcctcgccagcacctcagctttccgtagaggtcctctttctttattgtgtgtggttctacttcctcacatccttgtgccaggaaagaaaggagtaaggcaaattttcctgttacaattgaagtttcaccaattactaagaactttcctgcaagtacctgcacagcccattatacctcatttatatatgtatatattctaatgcttctcaccatctcttgatttgtgtcatcaatttaattgtgccctttttgaaattcatatgctgaaactttaaatccaatggatctatatcggaattttaatggtataattaatgttaaatgtggtcataaatgagaccctaatgcaatagagctgttgtctttattagaagaggaagagacaccagatacctctcacttctcacatgcactcagagaagagggcacgtggagacatagtgcactagaaggtgggcctctgcaagccaggaagaagccgcaccaagaaccaaccctgccagcaccttgatcttctacattcagactgcagaattgttagaaaatcaatatttgttgtttaagccacccactccttttgtcttcttacgaagacccagacaggctaataccacacaactctgttagctccgtctcctggagggagaagcagccccctgaagctgggcacatcgctcagattttcacatgaattaggcaaaaacagtagctctcatataaaaactgtcacgtccctgttgggacaaggtcttttaaacaagccctggggctttgtcacaaatgttgcattttatcctttattaggacttaactaattgacaatgagtaccagctggatggaaactgaccactgaccatcttctgctgtctccttattatatcacagaaaaccacagcaacattactctatgtcttcaactttctaaatttgtactgaatctattgctaaatgaggagctacatggggtctgagttttgttaccttcttcccagtcttccccaattaccaagcatagaagatactttcagtgaaatttagctgtcaatgcccccaacaccacatcatgttttaaggtccaaggactttctttggggggctattgaaaaacacttttgaatggaaaatcctaaagcatacaacagctgaaagaatggcccctgtgcacatgaaggctgaagggatggatgatagggtacgttcctccaaggtgttcctgggcatgtgatggttggatacctcatgcatacgaaaacaaggactgaactgagatagaaacaagggccatatcctataggaaaacaagaaaaaaacgggcatccctgaagagagttaattagacttggtgggtttaagatgaatttttttccaaagttttttaatgttctaagctaaatatgaatattttcaataaactgcaaattaaaaggagaatgaatttagaagtttagacagaaaaaagccatgagggtgtagaaagcaaatccacacaaaactgtcacatggcagaggccagaatggagctgatgcagctatatcattattctgcagacctagttgagaccctttggtgtttaaggcaggtccagcagtgaagaactcctttattttttgtctgggaaagttctaatctaatcttcatttctgaaaaggatttacatgataaagattcgtcttggcaggttttatttatttttagtcccctccaacccacgtcaatttgagtaaagtcatgtgttacgtaacaatgctgcagtcaacagtagaccacatatatgtttgtggccacataatgttgtaataccatattttcactaaactttttccatgttttgatgtgtttagatagagagatacttaccatggtgtttccatttcctgcagtgttcagtgcagtaacacgctgtacaggttagttgtctgggaaccctgcgctaatccacataccctgtgtgtagtagggtattccttgtaggtttgtgaaaattcacccttgatgcttgcacaatgatgaaattgcccagggacacatttctcaaaaagaacctctgtcaataaaccacacaccattgaatacaatccctgtgccttctgaactgaaaaccttctgctgagaaatctgttccttttctttctgttttctaaagcctcttttatttccagcaatgtggttttaaactgtgtcacattttttgtcattgggtttatcttacgtaaaatttatagagcttcttcattgtggatgaatatttgcttcccttctccaaatttggaaatattttttgctattattttgaataatttatctcttctctctctctctctctctctctctctctctctctccctctctctctctctctctctctctctctctctctctctctctctctctccccctctctcccttcactaccccttttgtcttgtctttgtataactcctcaaatgcgtagttgagtgtttagtgtctttcctggcccataagtcttgaactcttttttatttctttcacttaaatttttcttctctgtctctactatttcaaatgatctttctttgagtttactgtttcttctattacttgatctagtttggtctaaaatcttgttaaaatttttggctgtattcttcaggatcaatatttttgtttagtcatcttttaaatgttttatctttattaaaattctcacattgttcttgcatgctgccactagctcattgaacatgtttctaacatttactttaaagtttctgtcaggtaatccatgttcttccttttcattgatgtcagtttatggaccttttggttgttcttctgtttggaccatgttcccctgcttcttcattttccttgactgtctttgttgttatctgttctttataacaaaagccatcatatacttcttcaaagactaggctcatagagatcaccctcaccaatcagcccagacagtaattgtgggtctctcaaaacttgataggattcaaacttctgtctgttcttagtggcccctaggttttagaggatgatagattgtgccaggactcacaggtaagggaggtagaaactatgtactcatgaccatggggtctgtgctgatctgagcttctcttgtcatcactctcaatattcaacttccccgtggatcaggctcagctgtggctgctccacgtggggctgttctcagtctgttgcctctgtgtgtgcagaagtcctctgtgaagttaactagtggagtcagacaggaaaatactacagaccaagaattctcagactgttctgcaaagcccctggattcactgaaaaaagaacaagtttggtccagcaggattcatggcaagtgttggtgagggagataacagtaattcaagtggaagttctcaatgggactcgccttcagtacaaagaagattaacagtcctcagagacactgttcagaagattctcttttaagataataaaactgagagcccaagacaagtctgtgtattactgtgagggacacagtgtggggacatctatgtgagcacagacacaaaagtccctgcagggagacaggaggggactgcatgttagttgctgctcagaaccaccagggggcattcaggacaccagtaggcactcagaaccaccaaggagagctcagaatcaccagggggcactcaggaaactggcaggtgctcagaaccaccaaggggcgctcaagatcccagcgggagctcataaccaccagggggcgctcaggacactagggggctcagaaccactagggggcgcccaggaccaccaggtctctcaagacaggagggcgcactcaggacactagggggcgctcagaaccatcagggggcaatcaggacaccagagggacttcagaaccaccagggggcgctgagaaccaccagggggtgctcaggacatgaccggccctcaggaccaccaggggattttcagaacaccaggaagcactcaggacaccagagagcgatcagaacaccagggggcactcagatcctccagggggcactcaggacaacagggagctctcaggacaccagggtgagctcagtaaaccagtgttcgctcagaaccaccagggagcactgaggacaccaccgctcccttaggaggcagctccacatcaggtccctggatccgggaagggagggcgggtccttttggatcttgccactaacctttggggagttttcctgcttcctttgtggtttcaagaatcatttgcagattcttctcatgtacaaagctctgctttcttggattatgtaatgtttttggctttggatgctaccagaattacgttgtactgtgagaggattcattcgtggtgtgtgcaatagtgaatgaaagctccaatgttaggggtggctttgaaagctacgttaggggtggctgagggcagttagcagaaaatgatcatcactatagaaggctactcatttctttgcacatttgcataaacaattgtagtttatgccctaaaaactgcatgttttcttggccctttttcttaaatggctccactctaagtccagtaatctaattaagctgtgtttcaaagaccaccaatcaagttaattctgtttaatgcaacactttgtaaaggaaaatgtacatctgttttttagagtcagctttaaattttacattactttacaaatattgatttgtcaaatttagtctcataactatcttcagtaatttaaaatcttagtcatgtcatgttaaattaagtaatcctaggtttctcacttgaattagggttactaagaattagaatagtaaaagagtataattagcttttggtgaggtttataaagaaagatgaggattttttttttttttggcttaaaaatattctgtttcccagtttacagggcttttcaactggttttaagataaccactgtttacatctaaactttttttggtaaatgactgctgagtttctatacatattccatagctagagtttcaaagtaaaagctctagtatctttgtattagtgtgtgtatgcgtagatgtgttaatatgtgcatgtatatatatgtgtgtgtgtgtgtgtgtgtgtgtgtgtgtgtgttgtggctactaggtacaaaattggctttgaaataaatattttcaaattaagtaaatgagcccaatgcatttgaagtacatgtgactcaaataaatatttaataaataagttggctttaaaattattggtaaaaacaaattagagatattttaacaattatcagcataccttatagtttatattaattcatcaagtgattttatatttaaaatcacagctagatattatatggtgtcaaaattttttatgatgattataaaattattaacctcgttggccatatgcggtggctcacacctgtaatcccagctctttggaaggctgaggtgggtggatcacgaggtgaggagattgagaccatcctggctaacatggtgaaaccccatctctactaaaaatacaaaaagaaaaaaaaaattagctgggcatgctggcaggcgcctgtaatcccagctactctggaggctgaggcaggagaatgcttgaaccccagaggtggagcttgcagtgagctgagatcgcaccactgtactgcagcctggatgacagagcgagactccgtctcaaaaaaaaaaattataaacctcattaaaaccagaatgatctttgtaattttttgacaaatatgatgtttaatattgttgttttaataaaaaacaggtaaatagttattagaaaaacaattatttgcttaattattaggtttttactcaggcaagcacctgaaattcatgggttattacatgggtaacagagaaaaaactttaaaggatgaattacaattttcatacagtaatcttgataagctacttaaataaaatagggaaatgtaatcaaataaaccccccaaataaacttgttcttcaatttaaaaatctaaagtttaattaaataatagatattgactaaatgtttaggtcattactaattgttttaaaaaatatataagaaaatatttttcttaaaaaattattcttagaaaaataatgtaattcaaagttatttatataacatcataaaaagtaagagagttttaaagaaatttattgacatagagaagtacttttggtaagaaaggttaaaataaaaaaattttatatgagaaataatcttgcatggtaattttttatcctaaaataaaatgactaagaaagaatgacgtttagaataaaacaagatgttcaactatgccataaatggtttgtgtaagtgaaaataagatttataaaaagttaatttattaaaaaaccttcatattatcaagttgactataattgaaagggaagtatttataatagtctttatagagatctggcttttatataaaatatagtaatacactgaagactggttagaatgacaaaattgtcttaaagtgttgatttactaaataaaattataagatattttaattttttaacccccaaatttaacttttattgcatcttgccattgtgattttttccctttgagaagacttgagaggctctccattttttcatcacgtcctttaacattttttttcttacaggcgattagcttcttactgacttaacttctaactgttgttagcttttaactgctattattgtctgatgctaaaaacattttatctttaagttctaaataaaatgttttctttcaatataacattctacactcttggcttatctttaaatgtctacatttttctatgaaaccaaagtcttcacgtgtaatctgagtcacattcttggtatgtctaattaattcaaatgcttttttcattagagttgacctgcaggttatctacatgcattttccaatagggaaaagcaatcacactgtaaaaggttttgctttgctatttggtaactggcataaaacaaattttatattttattgaaataattcctatgttactgttattaaggtttccaacttactgagattttaagaaaatataaattaatgttattacattcatgtagctatctacattacttttaaaggccttgtgctgccacattactgacctttgactcctaggtctaaaaaggacacacagcattttgggagactaaggcaggcagatcacctgaggtcaggagtttgagaccagcctggccaacatggcgaaaccctgtctttataagaaatacaaaaattacccaggcatggtggtggatgcctgtaatcccagctacttggaagcctgaggcagggagaattgcttgaacctgggagacagagattgcagtgagccaagattgtgccactgaactccagcctgggtgatagagcaatattccatctcagaaaaaatatataaataagagaaaaaggacactaagtcctgctaaatcttaaacactgacagtaattaaagccccatctacagacctggaagaaaatgacaataaaaattcatcatactcttaagacataaggccagaaattgaaactactcaacaactccaggcccagggactattacagaagtggatttgtaagattgtaaaagctaattttgagatataatattacttgagagtttctttataagttaagcattaatattaaatgcacactaatggaagtctagcatctgggcccctgtgacagattgacaagggtttcttgaagaagtaatccactctttagcttaaaaaattattaaaatttataaaagacctatgaaaattatattttatggtaaaagtagttataatttaatagacttatttctcagaattgagagatagttttaatttttctcatgatgttcttataaggggttattgtttagaaaattaattctttcaaaaataaaagtttttgcttttttaagaaatcactgagttttcacttggctaaataaataacttactttacaataatctgtaattccattttgtaatatcaagtgttctaaataaacctttgatatttgacctccttcacacaataaaagtctaaattcagtcatttgacctcattattcttttttgatatttgatctcctgaagccaaaaagaaacatatttagcttctttggtacaattaaattatactggaagcaatgtcaaatttgaaatggtgtttaactttggactatatttatataaatgtgggctatataattggagtatattcatataaattaaagagtacatgttctaaaatggtatgaggttcaattgactttgatatgtcagtatattttgtcagtagtacttatgattattatataaaatttttgttcatcacagaaataaccaaactttctcctcaattctgtctttaaccgtggctattctaaaacttcagccatccacaattgttttcctttgattctttatcaggtggcttataataatctatagaattttgaggggtactcttaaatacacaattgtgacaattttataaattgtgccatttatatacagagaaaaacttccaagactctcatggagacctgatgcatttatgatggttgttaatataatgtcaaacaggacaggacttaattgcatgaactgaactaacaggagcctgaaataaattttatggcttattctttaaagcatttgctaattacttacattttgtttttcagaatcaaaaaaaaaattctcttaagctattcattgtttttaacaattgagtatagtatattctagtgagaaaattcaaaaacacaatttcttcttctctacataatttctccaaaatttggaaactgtgagtattgttatatcaaaatattaattcacataggttcaatataaatctgctttcttccgtaacagggcacaattggagacaatgatcattttaccaagactttaacttgaatgacatattttcatatttactttataaaatgaatttaagctggatagctgataaaagccccttgggaaaactggcatgtaacctgttttgttcagggccctgagctgtagtaagtcaataattttactttctgacagacccaggaatcccaagttgtcttggaaaattgaaaaaagaagaagtaacccaattcatatagctgtctgaaggcacagatgaaacaatgtctgggcttgatgcttttaaagattctacccttagatttcttataaaaaatttccagcaaggtcaatttatgaattaaatagcctatgtacaaaaaatagaaaaaaagagagctaatatgttaaattactatttttgcctcatcttatacaaaaaaattaagcctaaaacttatattacaaataaatttgccctactatgattgtgtctctaataactttggggaattatagagagaaatactgtttcaaaataaacaccagtgcatctgttattagattctaaccttgtccacttgtttttcaatttatattattttctacaatttatattagtttctacaatttatattagtttctataaaaatttatatttgcagaagcctccaaaatatttttcctgatttaaaattaccagaagttaaactgtgctttcttatagctagacatcttatactctaaagaaaataaaatcaatgacatgatttggctctgtgtccccacccaatctcatcttggattgtaataattcccacatgtcaagtggaaaaaggtgggaataattgaatcatggaggctgttttctccatgctgttctcctgttattctcacaagatctgatggttgtataaggggcctccctcttcccgtggcacttctctcttgcagccatgtgaagaagcacgtgtttgctaccccttccatcatgattgtaaatttcttgtggctttctcagccacgcagaactgtaagacaattaaaccttttttctttataatttacccagcctcaggtatgtccttatagcagcatgaaaacggacaaatgtaagcaacttaattatataccaaaactcttttatacctgcctgctgtgtgaagggaaaataagtcttgaggccgccaaatcaccaagctaaatgggagagtcaaactggtgttacaggagataggaagaaattattttggtagatagttagggtgacagaatttctgccgaaaacatttcttctaacaaaaatcagcttggcaattacttattttctattcacacagagttcaaagaaatcacttctaacaaaaagcagcctgaaagatcaggctgtaaaacatataagcaactctgccacagagagggtgtttctgggtgtaatcaccaaacttcacatacatacactgggccctagtaaaaacagtgggccttaatgagcacattcctttccttttctgggggcactataacatcagaaagctggaaacttgcacaagtttaggatgcctgcacttgcaaggaggtacctgggacctagcatggaaaatcctcttcccctttttagcactctgggagtggagccccagccttgggattcccaggtgtttcccttcagtgatcaggactgaacacacacaactcatcatgcagtttgtgctgagctgggttttccttgttggtattttaaaaggtgattcatggagaactacagatgttgagtgtgagtggacatgagtgagcaaaacagtgggtttgtgtggcagtttctgaccttggtgtctctgtgtttgcaggtgtccagtgtgaggtgcagctggtggagtctgggggaggcttggtacagcctagggggtccctgagactctcctgtgcagcctctggattcaccgtcagtagcaatgagatgagctggatccgccaggctccagggaaggggctggagtgggtctcatccattagtggtggtagcacatactacgcagactccaggaagggcagattcaccatctccagagacaattccaagaacacgctgtatcttcaaatgaacaacctgagagctgagggcacggccgtgtattactgtgccagatatacacagaggggaagtcattgtgcgcccagacacaaacctccctgcaggaacgctggggggaaatcagcggcagggggcgctcaggagccactgatcagagtcagtcccggaggcaggtgcagatggaggctgatttcctgtcaggatgtgggacttcatcttcttccaacagtttctctaatgaacctccctaattttagaattctgtggttcctaatgtcatctctacatattttcaaaaggtcattttaatatgaggacataacctctcatgtaccaaatgcacattgatgcttacaaagatgaaaagttctcaaccattgtcaccaggatcgcagtcctgaggaagctcacgggtgtctgatgagtctcctccattcaggcccaggacagaaacctcagggagactcctggactagaacggcagggattctgatcacagccaatagagagcctgggccagggtcagtgtcctgtagaagctcacagggttcacatctgacccttctcctgaccctaaagccaatccgcatcagcactgatctggtgctccttttgctcccaatacatgttctttctttggagtgtttgttctcccttttttatttgcttttctttcttcctgaaaaagaaacacatggtctctatgctctacactccagggctcaaggcattttcttagaactcaggcaaggctcaggcttggctactccagcccacgtgggagaggctgatgggatttccttctctccccatattctcagggccctcctctgtgttgtgtgtagactcatctgggaatgcaattggccgttaatagtgaaggggataaactcatttgatcaaaatgggatgtggatgtggaattaaccctgttctatgcacactgtcagagtcatcttcttcagaagtagtgttagaaagagcttgtgaactttatcagaatcaaaatggatccacttgtgttaaaaccctaatgaatgaagctggggaaggccatgaaggagggttctaacacacatatttcctgataagaagaactatcataaatagaccctgcacagccacaaccttttacacagaggccaccacagccttaaaagctttatttctccaagtaaatctgccccgcaactgcctattcaaccttacaccgctatctcaaaatagctgctgtcaccctcctcatttttccttaattctcttttttattattttttaaattatactttaagttctagggtacatgtgcacaaagtgcaggtttgttacatatgtatacatgtgccatgttggtttgctgcccccattaactcatcatttacattaggtatttctcctaatgctgtccatcccccttcccccaaccccactacaggccccggtgtgtgatgtttcccaccctgtgtccacatgttctccttaattctttatcttccttttcctacctgaatgtacccatacatattttaattgaaacgcacatcctagaaaaaatattattatactttagagtctctgtctgttattcaggttgacatgacaagctacagacggacatgccacttttctgtgagacatagaggatgacagtttttggagatgtctaggaatatccaatgtccataagatcagccatcaataagtgcagactggaggtcccagagagaggcgaagctgctgaatcatcgtggaatttcatcttctccagttctgctctgatggaatcaggcccacccattttatcaatgacaatctacctaacctagagtcagctgatgacagtattaatatcatctattaagtaaagtcataactatatatatagtgagagagggagagagagagagacggagtctcgctctgtcacccagggtggagtgcaatgtcgtgatcttggctcactgcaacctctgtctccggagttcgagcagttctcctgtctcagcctcctcccagtatctgggaatacaggcacacaccaccatgtccggccaatttttgtatttttagtagagatggtgtttcaccacattggtcaggctggtctcaaactactgacctcaggtgacccacctgccttagcctcccaaagtgctgggattacaggggcaggccaccaagtccagctaatttttgtatttttagtagagaccaggtttcacgatattggtcaggctggtctcaaactcctgatctcagcctcccaaagtgctgggattaaagatgtgagctactgtgcccggccaacaccacctatattaatgttggattgaataactacaaagtctaccctaaccaagtgtaccatcaaacttaccattacccagaggaaagaatctttaacatgagatctatattcttaaatgttttaaggtgtaaaactgaccacagtacaatcacccaattatgattttggtaatgagttgtagaaactgcatgtatattttggatattaacattttttcagatgcacaccttataattatattctctcattctgtaggttgcaattttttccacactttgcgggatctttttgttgggaggtggttctgcttgttcaattctgattttattatctgtgagtttaatttgaaatatagaaaatcatccttttttatatactttaaattttagagtacatgtgcacaacatgcaggtttgttacatatgtatacatgtgccatgttggtgtgctgcacccagtaacttgtcatttaacactaggtatatctcctaatgctatccatatcccttccccccaacccacaacaggccccggtgtgtgatgttccacttactgtgtccatgtgttctcattggtcaattcccacctatgagtgagaacatgcggtgtttggttttttgtccttgtgatagacttctgagaatgatgatttccagcttcatccatgtccctacaaagggcatgatctcatcattttttatggctgcatagtattccatggtgtatatgtgccacattttcctaatccagtctatcattgttggacatttgggttggttccaagtctttgctattgtgaatagtgccgcaataaacatacgtgtgcatgtgtctttacagcagcatgatttataatcctttgggtatatacccagtaatgggatgggctgggtcaaatggtatttctagttctagatccctgaggaatcgccacactgccttccacaatagttgaactagtttacagtcccaccaacagtgtaaaactgttcctatttgtccacatcctctccagcacctgttgtttcctgactttttaatgattgccattctaactggtgtgagatggtatctcattgttgttttgatttgcatttctctgatgaccagtgatgatgagcattttttcacgtgtcttttggctgcataaatgtcttcttttgagaagtgcctgttcatatccttcgcccactttttgatggggttgtttgcttttttcttgtaaatttgtttgagttcattgtagattctggacattagccctttgtcagatgagtagattccaaagattttgtcctattctgtaggttgcctgttcactctgatggtagtttcttttgctgtgcagaagctctttggttctacatactcaaatcaataaacaaaatccagcatataaacagaaccaatgacaaaaatcatatgattatctcaatagatgcagaaaaggcctttgacaaaattcaacaaccttcatgctaaaaactctcaaaaaattaggtattgatgggacgtatcttaaaataataagagctatctatgacaaacccacagccaatatcatactgaatggacaaaaactggaagcattccctttgaaaactggcacaagaaagggttgccctctctcaccactcctattcaacatagtgttggaagttctggccagggcaatgagacagtagaaggaaataaagggtattcaattaggaaaagaagaagtcatattgtccctgtttgcagatgacatgattttatatctagaaaaccccattgtctcagcccaaaatctccttaagctgataggcaacttcagcatagtctcaggatacaaaatcaatgtgcaaaaatcacaagcattcttacacaccaatcacagacaaacagccaaatcatgagtgaactcccattcacaagtgcttcaaagagaataaaatacctaggaatccaacttacaagggatgtgaaggacctcttcaaggagaactacaaaccactgctcaatgaaataaaagaggataaaaacaaatggaagaatattccatgctcatgggtaggaagaatcaatatcgtgaaaatggccatactgcccaaggtaatttatagattcaatgccatccccatcaagctaccaatgactttcttcacagaattggaaaaacctactttaaagttcatatggaatcaaaaagagcccgtattgccaagtcaatcctaagccaaaagaacaaagctggaggcatcacgctacctgatttcaaactataccacaacgctacagtaaccaaaacagcatggtaccggtaccaaaacagagatatagaccaatgaaacagaacagagccctcagaaataatgccgcctatctacaaccatatgatctttgacaaacctgacaaaaacaataaatggggaaaggattccctatttaataaatggtgctgggaaaactggctagccatatgtagaaagctgaaactggatcccttccttacaccttatacaaaaattaattcaagatggattaaagacttacgtgttagacctaaaaccataaaaaccctagaagaaaacctaggcaataccattcaggacataggcatgggcaaggacttcatgtctaaaacacgaaaatcaagggcaacaaaagcccaaattgacaaatgcgatctaatatgaaattcttaatgagttctatagttataagtacattatttctccttattaaaactaatcttttttgctgaatgggtggaagatggtggcttccctccaaaagaaaacatagttggttctgtaaagagttcacccatttcttccactataggcctgccctggcataatacaagctcccaacttaagaacttatgattttccatccatgggagaagccatcttttccatctattattaaaacagaagacacttcattaatatcactcccaaaataggctatgtcatatccagtgaggtaggatggctgacagtggtgagaatccaagtaattggtcaagcactgctatgtgtgaagaaacaccacagcatactctacactgtcactcatgatatggaattgttgcctcctcagcaatgtaactgagcccttaatatgtggctgggatgacaaagcaatgccagcctgcagagtggaacctgttcttccttctgggattagccaaaggccggtggcactcatggctgaccctactttccttacaactggacgaagcgaagcaactggatatgaacttctatcccaggatgtaactgtccaaagtgccttctctttatgtcaactggaaaagtgtgaaagacagacactattctcataaacggatatcctagttattccacccactagccagctcttccccccaggtggcagtcatagatttagaattgcaagtagaggccctggctaagcataccaccagtccctttaacaacacctaccataccatcatcattcttactgaagaaacctcacagatttgacaagtgacactatgaagctatatgaccctaggtattgcaactacagccaaaggtaacacttgtgtattaatgaaccctgaatgttgcatatatatacaagattagtcccacaatataactcaagctatgcaagcattagatacccatatttctgctagagatggatgccctctctcaggaccctgcgacagcatggtttagttgacttcctaacacatggaagactttcatatatagtagagctggtatactcttcattgctatcttcagttgctgtggattttattggtaccttgcactttaagtgagaatgtaatactgaccttctcaaaaactcctaggtccttgcaccataatgctccaacaaacacctactgtaattccggagactccagaatatttccaactccagtttaatggattcccttccaatatatacaagctatgccctttctaagaagtagccagattgactatgacacacgttttccatagaaacaaaatggaatttgacagtggggaatgatatacaggcagcttaatttcaaaatgcattttaaacttattttttgaggttttaatattattttcatactccttgaaacctgaaatttcacacttacattctaattgagacttaataacaaataaccagaacacatgaattgcctgtaatctctataccttgtattgtaagccacatttcaagtgtaaccttacttgtcagcacagtatgtttaccataggcataattgcttgtcctgactgtccagaaggcagggtggtattaagtatgcggcctctggagctgggaagtctggctttgtatactgtctctgccactgctaactgaaggacaatgggccagttacttcctgtaccccagttttgtcatatgtaaagtagggttgttgtaagaatgaaattagttaatatttagtacctaacaactagtaggcattacgtggtagctattcgtattgctatcgtcagagaacacacaggagtccattgttatttttaccctccccctccaaacaaaatgtgtaagacactagacatggtagctctgtaacggggttcgtcatgtattaaactgtgtacccaaatgatatgtcaaagtcctgacaaccagcacttcagaacacgtccttatttggaaatatggtagctggagatgttattagtgaagatgaggtcttacttgagcagggcaggccctcaatgtgggaagatggttgtctttctaagtacaaggaaatttggacacagagacagagacatacagtgtgccatatgacagcagagccaaagatcagagtggtgcagcagtaaaccaatgcatgtccaggattaccagtcacctccacaagtgaggaaagggcaaggaagaagtctcctgagtctcagagggagtgcagcccagctcacacttgattttggacttctagtctctagaactgtgagacaatacagtcctgtcatttttaagccacccagtttgtagtatttcattttggcagccctacgatattcatacagagttcttcacccaaaaggaagcactctttctcacaaacagtcaaagtcctggatgacggacaacctggagattgcaaacctccaaggaatcaaaggaggttctataaagtctaggagccccatctttcaaaggctgctcctcaagtccacacacacactttggaaggagaatcctgctcttggacatgggatccttagtgagccaactgccaataatccaacatcatcatgaattaaagatctctgacatttcctcgtcaccaacgggaattctgtcaagtagtaagtaaaacccttcttcaggaatctccacaccaaacagttctgcatggcttgggacgcctcaggaaacttataatcatggcagaagaaaaaggggaagcaaggcagtcatacatggtggcagaagagagaggttaaacttttcagtctctcttgggtgtaaagatacaatcttgaggcaaacagcagaatcaattttcttatgccttgaaattctccctttcaccataaatattcccttcacattaatctaactttatgtttgcatcgaactatgtgcctttttggaagttccggaagctaatttgagacagatagacaaagtcgggagaccctgatgcagaattccagaggtgacttcaatgttgctagttaacaacccaggcattgcccagatgatgccagcccaagatccaggtggactgggatgccagagagctgccagaacaagacgcacagacctggttctcagcccaaatcttgcatgcctttcttaccaactttcccttttttaaacccctgcctttccttcaaaattgaagtggttgcttgggatgggaatgcgttcacttcccctttaccattatggttaatacaataatttttgtaccagatctctctcttgttaattggatcctgcaggtggcagattccggaccagagtgacgttagaaactgaatgcacatactgggtggttcacagacacagtgttctgtgaagtttatgggtggattcctggggaagcctgcaagcctgttagtgattagcagaaccgcatccagctactgggatctgcacgccaggtgccgtgagcccctcaccatgttccctggtcccagctgcccgcggatggttcagccttgacaacgggctcggtgttctgggtggtgggagagcaagggggccccttggggagcgtgctacagggctgtgaatccaggggcccacccggtgttccctgtggagtcactgagggaatgaggggcttctcagggcacagagctgtaacgcctttgtgcagtggtggctgaatacagtgacactgggcgcgtggtgagaagcggggcaaggtcagttcactggaccctccgccctgagcctcagatgagtcgggggtccccagacaggcccggtctctgccctgcggcggacactggagcctttgctgtggccgccaccgaggagccttgacctcaaaggagggggaacctctctacccacctcggaaacctgaagggagcggcggtctctcccagacaggatctcgccggcctccgcgtctccaggcccaaccctgtaccacataaaggaagtccgcgctgagctaccgggacacagcgccgttgggtgggcgggcgcggcgcggcgggaagcaccggggcagctgccacagagatgcgcggggactgtcgggaagtgggcggtccgggaggcgcggggctgatgggacgtgggcggtccggggacgcgcgggggatggcgggacgtcggcgatcccgagatgccagggggcagctgggacgtgggcggtcttgagaggcgcgggggcagctgagatgcaggtggtcccgcacgcgcgggggctggcgggttgtgggaggtccagggatgcgagggggcagctggtacgtgggagttccggggacgcgtggggtcgccaggaagcggggtctaggacttagatccgccttctcttcaggccatgcagccccgaagctccgaatcctgggatgactcctgtccatgttggaagggaccctgccagtcctggcaaggttcaacggccttagggcaagaaatgttagtagagtcctggaagacgatgtggggaacgggtagcggccaccggatggtgatcgttcttctacaagaccttgacatggatggggagaaacagagaagaaccttccaagtttgtcccactggacatgcccaccacactttaccagccctttctagaaggcctgtgcgtaacacatgaaaaagctgctctcgacctttccctgaccttttaaaagaaaacatttgctgcatctaatccgcctagatgtaaggaggttcccaaatgtatgacagagtcagacaattacatgtcttgtaagttaccatgtgcttgtcttttgttttccgttttttttcgtttttttgttttttgtttttgagacggagtctcactctgtcgcccaggctggagtgcagtggcaggatcttggctcactgcaacctctgcttcctgagtttcaacaattgtgctgcctcagcctcccgagtagcttggattacaagtgtgcaccaccacgcctggctaatttttgtagtttttagtagagatggggttttgccacgttggccaggctggtcttgaactcctgacctcaggtgagccacccaccttggcctctcaaagtgctgggattacaggtgtgagccaccgtgcctggccgtaagttaccgtgtgctttttaaacaaatcatagcaaaggggtgtcttctggaaatgacattttgaaatggagttactagaccacccctggaagggacacagtaaccacacgtccacgttcgttcagtgggtgagaggacatggaggggagacctgggcaggaagggaagagggttccatgccaggctgctcatatttaaaagacattttcattgtagggacatggatgaaattggaaaccatcattctcagtaaactatcgcaagaacaaaaaaccaaacaccgcatattctcactcataggtgggaattgaacaatgagatgacatggacacaggaaggggaatatcacactctggggactgtggtggggtggggggaggggggaaggatagcattgggagatatacctaatgctagacgatgcgttagtgggtgcagcacaccagcatggcacatgtatacatatgtaactaacctgcacaatgtgcacatgtaccctaaaacttaaagtataattaaaaaaaaaaaaaaaaaataaaaaacattttcatatcgttgtcattgttttcttgtgtgcattttattcctcgctattgtatacatcattggaaattctaagtattcttttgaaatatctagtctttctagatgttctgaagtgcctgatgtatgttaaaattacaggtggtaaaataataaattttgtaaatgtctttttgttaaaattcatatgcagtgttttattttattttgatgttggtggggggtggggaggatggccaaatccctgcttgatcaacacacattgcgtttgtgctctgttcaggggaggagagaggaggagaaagtgcagatttccaggcttctgtgcgcaccgggaggagagattaatgatcatctcttctgtctgtgtgtttgttttatttatctatggatatcctgtgtataaaggatgaacaagtcctatttataacatctaatcttttcaggtgttaagttgccagcgtatgacggaagtagcattattaaacgaatgcagcttgtacatattgtgttaaaattcataaaaagccagtcttctgaaaagaacccttgggccctccctccgcagcctccggcgccagctgcaggaagacctggccaggggaaggcgggcggcagaagctgctgctggctgtggggaaggcggtggagcccaggcctccacaggctccccacaggctccccacaggctcgcgcggctctggttgctgggctccgcacgggccgcgtgggggcgcctgctgggagcgaggaggcgccatcctggctcgcctgctccaggaggacactctgggcctgcgcagatgcagttctccaggatgggcgcgggcgctgggggcggcgctccttgggctgctgcgcctccactgagccgcctgggtgtgaggacctcgcgccggcgcctccgggaaggacgcggagccgccgcggccgatcccagggctgcagctgctgcccgacgcccgcgggaaggcccttccgccaccgcccgggggttcgaacttggagcagctgctgccagctgaggcgccagcggcgtcgggagctcctcagagtcagtgttttgtgctggattcggcatgtcctctgaaaactcgggaatttgtcactgaaatggtgacaggaggtgagaagtttttttagacgttgccttcgctggcctgacgcggggctcagacctggaatcccaacactttgggaggctgaggcgggcggatcgcttgagctccggaggtggagaagctgccttcgtggtaactgtggtcttaagttcagctgagaacgataaatggcttttccttgaagtggctgcttttgtgatttctctcaggctcatcttttgtcagttagaaatccagtggtaggtgtagcttagagacgggaaatttttggttttgttttggctacacgtaagtgttggaaattattttctttaacgttccagtgtgagcaaatccagaaggatgtcagattaaacaccgaatttaacaaattcaaccgggcacggtggctcacgcctgtaatcccagcactttgagagaccgaggcgggtggatgatgaggtcaggagtttgagaacagcctgaccaacatagtgaaactccgtctcttctaaaaatacaaaaattagccgggcgtggttgtgcgcgcctgtaatcccagctactcaggaggctgaggcaggagaatcgccgagattgcgccactgcactcagcctgggcgacagagcgagacttcgtctcaaaaaaacaaaaaaaaatcaatcattggaatactgttgttcattacaattaatgaacgtttgatagacgcataaacgaactaaattcacaagtacatataagtaaaataagccaaaaaaaaaaaactacatcccgtatgatgacacttttatacattctacagaatagaaactaaagtgatatgaaggttgggagttgaatggagaaaaggtgagcgaaaagagggaggacggaggagttgcaagagaacaagagaaaatgttgagggtaattgatctgttttctatcttaataatggttatggttacatcaataatttctaaattgtacattttgtgtgttaattataattttatattattcaagctattacaaataaatacctgtataaatttcttagggacggtttaagggagatggataaatcacataaaaagtcagatatttctgaatgtacaatgaataacccttagctctatctttattttttggtaattcttaaatgcagcagatttttttaatgtttttattacaagaagggtttcttcaaaccacaccaggtgtgtgtaactctgggctaaagttggttaagggagcagtgggatccggtggagaggagcacaggcctcgatcctggagcccattcttgtcacatgtgagctcctggacacatctcatagctccctcatgcttctgcgtttacattctcatctgtaaatggaggaccaatgggcatctgcctctaacaatgtattttcatgtgttaagatgatgtatgttaagtgtttactatagcacaatcttttaataagaaattacatttttttccaaatactatcattgtcttcaagcgccaccaaccaccagaaaacttaatatgctctgtgccctgccctgtcctcagacatccagcccaagagacttttatatagtaggagatatgcaaatagttccctccctctgctgatgatgaaaaccagcccagccgtgaccgtgcagctctgggagacgagctcaagtgccaggattcccaagtgttttcacttggtgatcagaacttaacacagaggaatcaccatgttgtttgggctgagctgggctttcctttttactattttaagaggtgatacatgaagaactacagatattgttcgtgagtggatattagagaaacagtggatatgtgtggcagtttctgaccaggatgtctctgtgtttgcaggtgtgcagtatgaggtgcagctggtagagtctgggggagacttggtacagctgtggtggggttgggggtgtcctgagactctcatgtgcagcctgcggattcatcttgagaagcaatgacatgaactgggcccaccgggcttcaagaaaggggctggaatgggtctcatacattagtgctagtggtggtagcctatactatgcagacactgaagggtagattcaccatctctagagacaatggcaagaacatgctgtacttgcaaatgaacagtctgagagatgaggactcggctgtgtgagagacatggtgaggggaaatcagtatgagcccagccagaaacctccctgcaggaaccctggggtggggggaaatcagctgcagggggcactcaggacccactgatcagaatcaaccccagaaggaggtgcacatggagattaggggctggattccttccaggatgtgggacttcaacttcttctgacagtttccccagggaaccgctctaagtttagaattctgtgtcatctctatgtatttaaaaaagatcattttaatgtgaggaactaactattctcacatgcacaaaatgcagattcacactcacagagatgaaaagtcctcaactgtggtcactaggatcagagtcctgaggaatctcaggcgttcctggtgagtcttctccaatcagacccaggacagacacctcagtgagattccatgactagaacaggctttatggattttaaaaaatagagactgagccagggtcagtgtcatgtagaacctcacaggtttcacatctgacccttctcctgacgctaaagtgtgcaaatcagcatcaatactgatctggtgctgcttttgctcccaatctgtgttctttcttgagttgtccctttttcatttgcttttcctgctccctgaaaaaagaaagatgttgtctctgtggtctaaattccagggctcaagcccttttcttggagctcaggtgggtctcaggttgtggctcctgcagccacgctggggaggctgatgggactttcttctctcccattgctcagggccctccactatattgtgtggagactcatctcagaatagatgtggccagtgggagctgaaggggacaagcttgtttggtcaaaatgagatacaaatatggaattcaccctgtgctgtacaaactgtcacagagtcactttctgaaacaatagtgttagaaagaacttgagaaagttgtcagaatcaaaattgggtcacttgtgttaaaactctgctgaatgaagctgggaaaggccgtgacggaatgttctcatgctcatatccctgataccaagaactatcgtaaatagactcttaaaaccacaatcttgcacaaaggtgcccacaaccttaaaagaattacttctctgagtaatcttcccagcagctctctgtgtaagattggacttgatgccacccttgttattgattcttctatcccggagaagttgtctcaaaacagcttatgtaaccctcctcatttttctttaaacctttatctttctttacctgcctgagtgaacccatgcatgttcccattgcaatgtccatcttcaaataattatcattttactttagagtctctttttgtctgttattcagatttgacaagctgcagatggacacatcacgtttctgtaagacttaggggatgacagttttgaggcatggctggggaagtacaatgtccataagattgaccctcaataagtgcaggctgtaagtctcagagctgaagctgctgaatcaccatagaatttcatctttagttctgctctgatggaatcaggcccacctgtgtaatgaatgacactctacctaacctagagtcaactgatgacaggttaaatatctagacagcaaatttgcaacaccacttagattagtgtttgaataactacaaagtatagccgagccaagtatatcgtaaagcagactattatacatggagaatctttaacatgacatctacaattcttaattttttttacgtataaaactgatggttttacaatcaggctgtcatgattttgctaatgagttgtagaagttacatgtatgttttaaatattaacagttttttcagatgcctggtttgcaactatattctcccattctgtagatttggaattttttccatgctttgcaaaatctttatattttgatgtagttccagtccttcaattctgcttttgttgtctgtgcttttaatcttaaatttaggaaatcattgctaaccttttggtgggagagaattttacaattgcaggctatacatttaactgtttaacccatctagagttgattttttgtgtttattctaacctaatattcttaactatttgcaagtgaaaacccagtttgtttaacaccctctttaggggagagtatgatttagccgttgtgtagaaaatgttataaatcactttgccttcatattggttctcaacttgaaaatgagtttgccatcaatacgtgggtttatttctgagctctctatatgtatttatgccagtaccatcctgttttgattatgtttgtaattaattttgaagtctgagagtaaaatgcctccaagtttattcttgcccttttgcagatattagacaaaatattttaacatttcaccatgaagtatgataacagctatggcttttcataatgaattttattgtgtttaggttattttcttgtatttctattttgggtagagtttttatggtgaaaccttgaatttttttaatgttattttctgtctgagaagttaatgggaccttcttcgtatttaatttggcataccaaatgtattgatttgaggattttgaatcatctgtgcatctcaaaaataaatttgagttggtcatggtgtatgatccttctaaagtcctgtggaacttagttgactattatttggtgtgtggagggggctcatttatgtctactaggaatattggtctgtagtttacttttttgtgaccttgtctattactgaaaatacggtaatttgggccttatagaaagactggaaggttggcatctcaccaatttttgaaaaagttagagaatggttggcattacttctttaaatgttgagagtcctttttttacttaacatgtgacctatcatggagaatatttagtctttgcttcggaagcatacatattacactgctcttggttggaaggttctgtagatgtctattaggtcaatttgttcaatagtgttgttcaagtccactgtcttcttaagaattctcttaatgatgttctatccatcattgaaagtgaggtgctaaagtcttctcctaatttttattattttctatttatctctccatatctcttaaggtttgcttaatgcagttatatttatttttgtacaaatatgtaaaaaataaatgaaataataattgctaagtaattttaatggcaaaatcacataataagaaattatattttcccaaatgctgtcattgacactaagctcctccaggaatctcacatctgctctggacacggctctcctggtgtcctaccccagagcttgctatagaggaggagacatgcaaatagggccctcactgtcctgatgaaaaccagccttgcctgcgtctacgggagaagagccccagtccagaagtaccaggggtttccatttggtggtcaggtctctgaacacagaggactcactatggagtttgggctgagctgggttttccttgttgctaatgtaaaaggtgactcatggagaactagagatattgagtgtgagtggacacaagtgagagaaacagtggatatgtgtggcaggttctgaccagggtgtctgtgtgtgtttgcaggtgtccagtgtgaggtgcagctggtggagtctttgggaggcttgttatagcctgggggtccctgagactttcttttgcagcctctggattcacctttagtacctttattaggtactggatgagctgggtccatcaggctcctgggaaagggctggagtaggtctcatttatgagttgttgtgtaggtagcacaagctatgcagactctgtgaagggtcgattcaccctctccagagatgatgccaagaaatcactgtatctgcaaatgaacagcgtcagagccgaggataggtctgtgtattactgtggtggcattgtgtgcatcccttgtttaggtacatgcagagatgctgctttggtgtgttcaggggctcctgttttggggacaccaattttggagtttgcagtatccttgagtccagtacgttcatggtggcattgggtctggggtgtgcagtggcaatgagtccaggatacatgcagctgatgccgtatcttgtgaggacaagaacaactacaaaacgatcctattaataaataggcaaatgacttgaatacacatttttcaaaaaatacatacaaatgacatatagatatataaaatgttaaatatgagtaataatttttaaaattcaaatgtaatctacaataaattatcaccccatacctgttagaatagctatttttaaagaagatgaaagataaccagtattggggcagaagtggagtaaagggagcctatatatattgttactgaaaatgtcaattagtacagacattatggagaatactatggaggttcctcaaaaaataaaaatagaactaccatagtttccaacaagcccactactggctatgtatccacaggaagtgcaatcagtatgtcaaagagacatctgtgcccccacgttcattggaggaatatttatgatagtaatgatgtgggaacatcctaaattaccataaatggatgaattactaaagaaaatgtagtatgtacccaatggagtaatgttcatcctaaaataagaagggaatcctgcatttgcaacagcaggcatgactctagaggaccatatgtgaagttccacaggcaggcgcagaagacaagtaattcgcgatttcactgtagtttgtttaaatggtagactcacagaagtagagtggagtgttggttaccaggggctggaggggtggactggaaaaggcgagattttggtcaaagggtgaaatgttccagttagacagaaggagaaagttacagtgttctaatgcacaagatggaaaatatggctaataatgcattatatatttcaaaatggctaaaaatgcaaatgttaaaaattttctcactaagaaatgatacagcctgggcgcggtggctcacacctgtaatcccggcactttgggaggctgaggcgggcgaatcacaaggtttggagttcaagaccagcctggccagatggtaaaaccccgtctccactaaaaacacaaaaaatagccaggtgtggtggcacgcggttgtaatgccagctactcgggaggctgatgcaggagaattgcttgaacccgggagacagaggttgcagtgagctgagatcatgccactgcactccagcctgggtgacagtgagactccaactcaaaaaaaaaaaaaaagaatgaaatgatagctgtgtgaggtgatggatatgtcaaatagcttgattaacaattccataatatatacatgtatcatagcatgtgtgaggtgacctgtatgaaggtgaagtgacctgggggctgtgtaagattacctgggggtatgtgtgaggtgaacacggcacatatgaggtgaccagagacacatgtgaggggacatgggagatatgtcgggtaagccagggggatttgtgaggtgacacagagcaagtgtgaggtgacgtggatgcatgtaaggtgatttggggcacatgtgaggtgacgtgggggatatgtgtgagctgacctcgggtgagtgtgaggtgatccaggatggatgtgaggtgacctgggggtgtgtgtgaggtgacttgggcacatgtcaggtgacatcggggattggtggtgatgtgggtgtgtgtgaggtgacctaaggaggtatgaggtcacctggggcatctgtggggacctggaaatgtgtgaggtgggtacaggtgaagtcacctagggcacatgtgaggtgacctgtggaatgtgtatggtgacctgggaccgtttgaggtgacatggggaatgcgtgaggtgacctggggcatgtgtgaggtgacaaagggcatgtgtgcagtgacctgggtgcatgtgaggtgacctggtgcatgtgttaggttacctgggggatgtgtgaggtgaacaggggcaggtgtgaagtgcctgaggaatgtgtgaggtgaactggtgcatgtatgtggtgacctgggggatttacgaggtgacctgcgggatgtgtgaggtgaccttgggtgagcgtgaggtgacctgacgtatgtatgaggtgaccagggtgtgtctgaggtgatgtggggtatatgtgcggtgacctggtggatgtgtgaggtgacctgcaggatgtgtaaggtgacactggggatgtgtgaggtgactcagggcacatgtgaggtgaaattggggatgcgtgaggtgattcagggcatatgtgaggtgaccttggggatgtgtgaggtcaccttgggtgagtgtgtggtcatctgggatatttcccaacttcgtaaggaaagcctgcaacaacacatggcattagaagcttcacactctagcaccattaatgcgtacatcctcaaggaactctaaatgttttgaggttagcttaaatgccatggagcggcaccttccccaggcacactcatatatgcatcctgggtctccctgccaagctgtatctcctcaaatttacagtttatgtttgctctgtgacatcaactctgatatgttcaagtgtgtttttttttctttatttgtagttgttcaggcttgttgtttcactctcattactctgggctcagtcctctcctcaggtgtcccacttcagagctcgctgtgaaataggagacatgcaaatagggccccccctttcctgataaaaagcagcccagtcctgaccctgcagccctgggagagaagcaccagccctgggattctcaggtgtttccactttgtcatcagcaacaaacaaattaccatggaatttgggctgagctgggtttttcttgctgctattttaaaaggtgattcatgaagaactaaggatattgagtgagtggacatgagtgagagaaacagtggatttgtgtggcagtttctgaccagggtgtctctgtgtttgcaggtgtccagtgtgaggtgcagctggtggagtctgggggaggcttggtacagcctgggggatccctgagactctcctgtgcagcctctggattcaccttcagtaacagtgacatgaactgggtccatcaggctccaggaaaggggctggagtgggtatcgggtgttagttggaatggcagtaggacgcactatgcagactctgtgaagggccgattcatcatctccagagacaattccaggaacaccctgtatctgcaaacgaatagcctgagggccgaggacacggctgtgtattactgtgtgagaaacactgtgagaggtcggaagtgtgagcccagacacaaacctcctgcaggaacgttgggggaaatcagctgcagggggcgctcaggacccactcatcagagtcaaccccagaggaggtgcacatggagggtggggtttgtttcctgtcaggatttgggacttcctctgcttctgacaggttctctagggaaactctttaattttagatttctgtgcccaccaatgtcatctctacatttttttaatcattggttttgaggactcggtctcacatgcacaatatgttttttgccacctatgggaatgaaaggtcctcaaccctggtcaccagcatcagagtcgtgaggaagctcaggggtgcctggtgagtcttctccagtcagactcaggacagtaacctcaaggggattcccttgtgagaactcacacattttcatgagaacagcaccaggagtcagttcttaaccattcatgaaagacccactccatgacccagtcacctcccaccaggtcaccccttcacaactggggattataatacaacatgagatttggggcaggacacaaatccaaaccatatcagatacacattgtgaaatacgcatggtggtcaggtaatttgtatttctatcacctcacagcgctaccattttattattttttttaatttactgcatgagtgagtgtctgatgagaacacctaagatctaccctttcagcaacaatcatttttacaatacagtattaactataggaccattgctgtacgttagatctccagaactcatccaacctgcacaactgaaactctgtacaatttaacacacatcacccaatttccctcacctcccaggtcctgggacccactattctactctctgctttcaagagcttgaatattttagatcccacatgtaaatgagatcatgcagcatttgtctttctgcatctggcttattcaactcagcatcatgtcctccaggcccatccgtgttgttgcaaatgtcagaatttccctcttttcaaagccaaacaaaatacagatgtatgtatacacattttctttatacattcatccatttacagtcattaaattattttacaaatctacactattattaataatcttgcaatgaacatgtctttggcaaagtaattttatttcctttgcatatataacaagaagtgggatcaccagattatatgatagctttatttttaacttatcaagtaaccaatcctaccacaggatatttccctttcccccacattcttgccaacatttgtcatctgttacatttctgataatagccatattaactagtgtgagttgatattgcattgtgcttctcatttgaattcctctgataattaggaatgttgagaactttttcgttttctgtttgccatgcatgtatcttctgaaaaaaattatccaggtttttgcccttttttatcagttcatttgttatttgctgttgaggtgtatgggttatttatacatttggacagaacttcttgtcagatccataattgcacatagtttttcctgtgctttgttattaaattcaaagaaatcagttccgaattaatggcaggaattttttttgctccatgtcatttatgagtttatggcttcaggtattatgtccatttttagttgaatttttttttttttgggagacggagtcttgctctgtagcccaggctggagtgcagtggcgcgatctcggctcactgcaagctccgcctcccgagttcacgccattctcctgcctcagcctccgagtagctgggactacaggcgctggccaccgcgcctagctaatttttttttgtatttttagtagagacggggtttcactgtggtctccatctcctgacctcgtgatccgcccgcctcggcctcccaaagtgctgggattacaggcgtgagccaccgcgcgcggcctattagttgatttttttatatggagttagagaaggcctaattttatttcttttgcatatgaatgccagttttacaccattattgaaaagactgtcctttctctactgtgtgctcttggcacacaaaatcaggagagacataatgacaaaaaaaaatgagatcaatagtcctgatgaacatagacctgaaagtcctcaacaaaataccatcaaattgaatccagaagcactttaaaatgtgatacatcatggtcaggtgggctttacccctgggatgcaaggctcgttcaatatccacagtaactctgattcacaatgtaaacagaataaaagcaaaaagcatatgattatgtcaatagatgctgagaaagcttccgataggatctaacatctactcatgataaaaaccctcaacagactagacatcaaagaaacatacttcagaataagagccatctacaacaaacccacagttaacatcatactaaatgagccaattaaaacacttatctttataaatgacccagtctcgggtgtttctttacagtgcgagaatggactaagacagcatccaaataggaaaggaagtcaatccgtccatcttcactgatgatataattctatatctagaaaatcctaaaaactctgccaaaataattctagaataaacaactttagtaaagtgtcaggatacaaaatcaatggacaaaaattaccagcatttctataagccaaccacatccgagctgagagtataatcaagaacacaatcctattcgacttacagtatccacaaagaaaatgaaatgcccgggaatacagataacaaagtgaaagatccctacaaggagaactatgaaacacagcatacataaatcataaatgatacaaataaatgggaaaacatttcatgctcatggattggaagaatcaatattgtaaacattgtcataatgcccaaaggaattcagattcaatgctatttacataaaactatcatcatcattcttcacagaatcagaaaaaaatctattctaaaatttatatggaaccaaaaaagaccctgaatatccaaagcaatcctaaggaaaaagaataatgccagaggcatcatgatactgaccttaaactacaccataacgtcttgctaacaaaaacagcctgtactggtacgaaagcagacctgcaggaaaaaaaatagatcaaaatagaagacagaaataaagttgcacacctgcaaccctttgatctttgacaaagctgacaaaaacaagcaatggaaaaaaaaaactctgtgttcagtaaatggttctgggataactggattctggcaggtatgcaaaatgcaagagtgaaggagcctgtgcagcttctacctagatttcagatgtgtagagagccctgcatgcccaggaagaagcctgctgcaggagtggatccaccacagaaagcctctactagagcagtgccaaagatggggaaagatggagttggagcccccattcagagtccccactagggcacttcatagtaaagttgtgggaatgtggccacaaccctcaagaccccagaatggtagagctacgggcagcttgcaccctcagcctagaaaagcttccagcacttgactctcacttgtgaaggcagccccgtggtctgtgcctagcaaacctatagggattggctgcctgaggttttggggacccaatccttgttccagtgtgccctggttgaagtacataaagtcaagagagattattttgtagcgttaggatttaatatctgcagtgctgggttttatatgtgtgtggggcctgttggttgttcctttggccaatttatccctttgggattggaattatttacccaatgcctgcatcatcattgcaccttggaagtaaacaacttttattttttaaatttgcaagctcacagctggagggacattgccttaagactcagatgagactttgaaaatttgagttggacgttgatgaagttaagattttgggcactattgaaaaaaggtgattatattttgcaatgtaagaagaatatgagaactttgggtccgagagtgcaatgatataatttaggggttttcccctccaaatatcatggtgaaatgtgacccacaatgttggaggtggggccaactgggtggtttgggtcatggggaaagatttttcaggactggcttggcatccaccccatggtaattagtgaattcttgctgtattagctactgtgagatctgattgttcaaaagagtcttgcaatcctgctaccctctcatgtaacccctcctcacaatatgacacagccatctccccctttgccttccaccatgactgtaagcttcctgaggccctcacaagaagcagatgctggtgccatgcttctcacacaacctgcagatctgtaagccaaataagcctcttgtctttgtaaatcacttggcctcaggtattaatttatagcagtgtaaaatagactaatacactgcccaaagcaatatacagagtccatgcaatttctatcaagtaactaattaattatgtatttttaaaaatcctaaaatttatatagaaccgaaaaacactctgaatagcaaaagcagtcctaaccaaaacgaacaaagctggaagtaccacattccctgacttcaaattacacagcacaaagataataagaaaggcagcatggtagtggtagaaaaaaaatcaagagcccagatatatagccaaatatctacaaccaacagttctttgacaaaactgacaaaaatatacactggagaaacaaccctctattcaataagtagtgctgggagaattagatagccttatgtagaagaataaaatgagacttctgtatcatcatagacacaaattaactgtgaatatggattcaatgtttataaactcataaaaatacttgaaaaaatctaaaaataatcctctggacattggcctaagcaaataaaatatgactaagacttcaaaagcaaatgcaatgaaaacaaaattagacaaacaggattaattgaaccaaagatcatctacacatcaaaagaaagaaccaatatggtgaacagacaacctgtgaatggtaaaaaaaaaaaaatgtgcagtctattcatcaaatatatagatctacaagtaactcaaataagtcaactagaaataacaacttcataaaagagtgagcaaaaacgagatatttctcaaaagaagacatacaagtgttcaacagaaataaaacatgctcagcatcacaaatcatctgataaatgtaaattacagacaacatgatatagcatcttccaccagtcagaatggctattaaaaataaaacagatgtttgcagagaagcataggaaaaataatgctttttatatgcttgatgagaatacaaattggtacaacctctatgaaaaacaatacagaaatttctcaaagaactaaaattagaattaccatttgacccagtaacccctcctggtgggtatgtttctcccaaaaggaaacttctatataagaaaaagtcacctgcattcctatttttattgcaacactattttcaatagaaaagtcaagtaatctctctaagtgtcaatcagtggatgattaaataaaatatgatagatgtaaatcatggaatactatgcagccataaaaaatgaaattgtgtctttcacagcaacatgaatagagttgaaggacatttcctaaataaaataactcaaattctcttttataattggaaagcacacaatgggtacacatgtacatagagaaaaacaatagacactgggtactgcaaaagaaggcaaggtgagaggaaagtgagggttaaaaaatcagctattggctccaatgttcactatggggtaacagttacatcagaagcacaaacctcacctttatgaaatatattcatgttacaactctgcacatgtgcaccctgattctatgaaaataaaaacagaaaacatgaacagaattgttagactgctagctagattgaccaacaaacaagaaaaatgcaaaagtagcaattctttgttttgtaaccctttctcattttctggtaccataagaaattgtagactatcgtcctatattcttttctgaagtgctaccattagccatttctcaaagaaattctggttccttttttcttttattttctttcattttttttagacagagtctgcaacgtccacctcccaagttcaagcgattctcctgtctcagcctcccaagtagctgggattacagacgtgcaacaccacacctggctaatttttgtatttttagtagagatgaggttttgctatattggccaggctggtcttgaactcctgacctcaaatgatctgcccacctcagtctcctaaagtgttggaattatgggtgtgagccactgcacccagccgctggttccttttacagaagaatagtattaaaaactcatatcttgattcttgatgtactttttgttaatttcttgtagaacatctcaagtaatcaatacaggaagtatttgttgtgtattaacccatatatatatatacccacatctaaacggtttttatttatgttcctatattatgctaaacttgcaaatccactgagataccctaagttaataccacatgaatgattttcaccttccttctatgcctttccctaacctagcactccaaccgtggggaaccccctcccaccacacaccatccattccctttgtagtccatttccaggattcctgtagagtggaacccgattgtgtaagttgtgctcttttgtggaacatcatcaagtggagtccagtgctgacgtgcagtttcttttttctttaatcttatggactacactatttctgaacctacttagtacctcttttgatttcatacattagtataatggcataagatattttctatatagtctgcattccatcctggaattcctaatcacctatttttttaaaatttcttgtggattaagattgtattagtcagtgtcccctagagggacagaacaagtaagatacacatacacacacacacacacacggagtttattaaggagtattaactcacactatcacaaggtccacaataagccatttgcaagctgaggagcaaacaagccagtccaagtcccaaagctgaagaacttggaatccgatgtttgagatgaggaagcatccagcaggggagaaagatgtaggctggaaggcgaagccagtctaatcttttcatgttcttctgtttactttttattctggccacacttgcagctgattagattgtgccacccagattaagggtgtatctgcctttttcagcccactggctcaaaggttaatctccttcggcgacaccgacacagacacacccgggatcaatactctgcatccttcagtgagatcaagttggcactcagtatttagcattacaagtccaccctttgtcaacttgaacccatacacatctcctgagattatacataatcttcaaataaagacaagaataaagtcataattatgcctaataatacaattattcttcttacaactggaaacacaccaatccccaatccaaatggtactacatatgctccactccctcaaggacacagccaggatcatctgatgacttggtgtctagatggcttcagcacttttaattttacctccaatgttagactccactttatcaatgcagatgtagcagaatattttaagacattgatatgctgaaaaattcaacagttcataaaagttgccttcccaccacagccagtggttactactgaataaggacctgccatcctctagggagaagctataatggatggggtgcactgttggtggttatggaaatcgatccatcgtggcaaatggcagcatctttctttgataacattatattctattgtgcatatataccacattgtctttattcatttgtctatctactgacagattttttccatatgtttgctgttattaatagtgtttcaataaacataggatgcagatatcttcacaaggtggtaatttcatctcctttggatatactcccagaaacaggattcctggtcatacaatatttctggctttaattcatttaggagcctttatactgctttccataattgtgaaaatgtagaatggtatagccattatgaaaaacagtttcagttttgaggtatgatctgtaaacaaataatgtttgttatggctctcaatgagagtttctactaaatatgatggaaggtcaggaaggtctctcaccttaaagcagggatggattatgcctcttatttcctaaaagcaaaagattggaagcatgcatgatggaggtggttggcaggtttcaggatgatctcataagaggagaatctgttggataaaactgttgggttttcagtcatagacacacctacactcaatatgaaatgatgaaatcaagtgaggatctagaatgtgttcgcttgaagcaacagcatattctcaaaggcacctattgctccatcacaagggtgatgaacttttgaaaccagtaaagtgtgagagcacagtaagtgataaagttatcacatttacatgaagtttgtttaatgtgccaagggctcgcacagattaatcataaataaacacaatgtattttagcatacatagatgtctagagaagaatcttcttagagaaacttcttcaggttacagaaatctgtgtaagttgtagatctaatggagaagtgtctatgaatactggtctgtttttgaagtatggaaagatgatctcttttggagtaggcttgcgattgtgttgatttcttaattgtttcttgagttgtaacaaaagaaccaaaaaaatgactaaccggagtttcatggctgtgttgataaaaatttttcataagctttctgtcaattatttgagaccagatttcctgatttttttctccaatagatacatgttcacaagatctcaggaaaccacctctcaggtgctttagtttaaaagactagcttcctagaaaaagaagattctgtctaaccatgacaagttggtttcatctgcaaaccatcaagtttgagacctcattgtcaagaatcataaaaattttaactccaatgtactgaaaatcataaatctcgaatttaatgttgataggcattgacaaaatggttcattcttggatgcgtcctatgttgctggctcaacatatcagttaattgagaatcctcacttagctccctctgtttgtagcactgagttgattgtcaatcttcagagtcatccgttgaaggagagtcctgaggttcatgggattcttgtagacactcaggggaacaaaagaaagaaacagaattgagggctgccagccatttccacatcactaggaataattaccatctaagtataaaggtctgcatcattcagaacaccctgcatgacaggctgatgcaaaaaatccaaccctacagaggctccacagcaacctttacagttctttccgggaagaaataatctccaagttaagtgagtcagtaaagctgctctgagctacagtaaaaattggattgggcccgatttgtctgagttcagtgtaattattatactcagctgctgccccaatatagactgaggatggataatttaaatgagcctggctatgtggtttgttatatatctgaactaaataaacataaagggcctgtctggactagcgtgagggtgagagatcctgggagccccagccccccatactcttatctcccttcctccaggaacctctaggttctcagggtgagaatccacaagatccattcatggctctattaccaggagaccaaaatctctgaccttgttcatacagacaaacaggcgaaggacatttttagatccttatctatgtggcgaaaggcaatctatccccattacaagccttaccagcaaccttcctttgtcatgaaaatgggtaaaattagccaataagattacatttaagaaaattttcctgtgatgttccagccagaaaacagcaaaaatcagcttcacacctggagacttcttgcatcggtcacagcccagagaaagaagatcaccatagcattaaaatgcaactgtaagaacatgtaatgcttccatgttccacgcattacgtctcaccagtttagtcaatatggattaaatatgagagtgtggcaattcgcaaactctatctgaggaggaaaatcggataaaaaatgttatgaaaaataaagcaatttgaagcctctgacttcagcaacttcaccactaatgaaatgatgtaaccctcattggcctcaaatttagttttcacggggcatctgcagggttccaaagtgagaccaggtgaattcaatgtgcatgcacttcccaagtgtccacttgtattctgtttctttacttctgtttacagaaagtagacacatattcagtcttagtaccagtgtagggagcgctttccatgagatggataccagaaaaaaatggcaaacatgggatccgttaatataaaaattagccacgatgtatatatatatatgtgtgtgtgtgtgtgtgtgtgtgtgtacacacgcgcgcgcatgtgtgagttgaatagcagagttggagtgggtttctatccacatgtacctgcacctgcaggtattctcaggtgccataatcaactgtaggaccctaaaggaaataagagtctcccctcaacccctgaagagtgtttgggttcaccgtgtgtccaatgattctgtgcctcttgagctccaggaaagggctccctggtgatgcatgagatcttttcttggagtctctctgcagagttcactgggtttcctaaaggcaattcactatttcaaaagatggtgtgaggagcatgtggtgtccctaaaggagaattctgagccagggcacaaccactttatactgagctggatacactggtaggaatatactctgtcagctcagatagaaacctccctgcatggttggggctgggctgcagggggcgctccggatacacccagcacaggctcccgccccagagcaggtgcacaggaggctggggagaggttcctcccagggcctgggacttcctttaaaaatatctaaaataagtatttcacaaagactgctgaagtttgtataaatatctattcaattgtgagcatttatcaaactggatgttgtaatgagaaccacttttacaatggggatttcaaactctgctggaggtcaggaagagatcctttcttataaataaatgcaatttttggataaacacagtcattccctaaataacgcattcacatattatggtctagaaatgatgcaagttgaccctgagacagtcaaatgtggtttcaaagtgaggtgctgtccttgaggagcttgttctccagtgggggaagctctgtcaacacagagttcagggatgtgtaggggacacatggcctctaacaggattacggcttgaaccctcagcttctacagttgtgtcacccatgtgtctgtttctcatactgggtcaggaattgggctattaaatagcatccttcatgaatatgcaattaactgaggtgactatagtatctccgttccctgagagcctcacccaacaaccacacccctcctctggagaagcccctagatcacagctcctcaccatggactggacctgaaggatcctcttcttgatggcagcagcaacaggtaaggggctccccagtctcagggctgaggaagaaaccaggccagtcatgtgagacttcacccactcttgtgtccactccacaggtgcccactccctgcagctggtgcagtctgggcctgaggtgaagaagcctggggcctcagtgaaggtctcctataagtcttctggttacaccttcaccatctatggtatgaattgggtatgatagacccctggacagggctttgagtggatgtgatggatcatcacctacactgggaacccaacgtatacccacggcttcacaggatggtttgtcttctccatggacacgtctgtcagcacggcgtgtcttcagatcagcagcctaaaggctgaggacacggccgagtattactgtgcgaagtacacagtgtggaaacccacatcccgagagtttcagaaagcctgaggaaggaggcagctgtgctgagctgaggcagtggtacagcagttttctgaacttccatagtatctcattttgcattgagttccgctttaatattagccaagaatatgggatagacgggtgctcctaagagatccttaacttgcccattttgatgggttttcccaaagacgtgagaagccacttttttcgcaaagcatcccaaagccatgccctgctccagaaacacgtgtatccatttcctggtctttgattaactgacaaactctcatcagcgcacctgggctaatttcacatcaggtagaaatatgtgctttaaagcaaggctaacgttgtaatagcaattcctgcttaataaccttcagcattgttgttgtgtgctccatcaactaattacgttagttcaaggttctcaatgggagtttctaataaatataagggatgtatagaagttcccctaattaaaacaattgtgaagacaacctcagtgttcaaccatatttcaacccttcaccacaaaggaactttcatctctcctggaagttgggttcattttcaaattagtttttttattttaatatctcaagattattgtatgtgactattttagcagaaagtgaattatgggaacttgaactaaccaactgaaaatacattcagaactaattaaacaagatgccagaatgtgattggctccaggcattttaaattcaacaggttatgtaaccaggctttaaatttgcacatcttcgtgttaccttcatgacacagtcaactcccattatgtaagaaatggtgagtgcattcccaagggtcttgcacagttataaaaatagacttgatgaggtgaggagttgtttaaattcccctctgaagaagcagcatcaacccaacaaaccactctcttccctctgtgactagagctctgtcacaggccacatggacctaaatccttgatggagattacaggactacgtaaattggactgatcgtttttatgctgttaaattaataggtgagtctgcactccagcctgggcaacagaataatcttgtctgtaaaatacaaaagaaagataaattaatagatactgactttgacatttcggataataatattttcataaaccgaatttaattatacccacattgttacctacaccttcactgaaaagttcctagttatgttgagttccatcaacactccacatgttcaaatctggacatccaagagagtctagagaataaaacgcaatgagggcagtgaaacttgcgtatattcagcacctcttaactcaggaggactcaatacaccctggaacactctgcttttctgaatggctcacaatgactccagctcactctccaacctcctcaaacatctggcctctgtttgccctaagttcacgctctgctcttagtctatgttctgaagtctttgtagaggtgaaaatgagctgtcagatggatcttccttctcactgcaacatggaatttgctatttcacttaatgaccactctttccacaatggttgatttcttttggcctgttcattactggtgattttcaagggaatctcagttgaatctttactgttttgcattttgtctccatgacaatgttgggaagtttttcttctagcagcataacatgatctagtgacctgacacatttgcagcaaacaatacctacaaattcagaagctctttggttttctttccacgaaatataattcttgctcttctgtgtatgagcacatcctagcatccctgtacacacccaggtagatgtaaacacgccgatgaaatattccctgtaaataaaaaaagtatctcagtttctctcaatgttcataattctcctgagggtgaggaaggtacttctgggtctgctcaaacaaatggcccagagaccacctggtaggtaggtaaggagctcacctcgctctggatattgagtctgtctctttccctctgtcgtctcatagaaggccagcccacttgttcagctcctaagaagagagcccaggtttatccagattatacaacacaaccagcttctgatgactctcctgttacaacatccatggagatattttgtgtattatataattcaccaaactaatgtgaaatgcccaagttgcaatactgcacaccctagggtatgttcttgcaattcagcggaggagaaattctttcagagacagatggatctgaattggtaaatatgtgggtacgaattctgggtttgagtgtcattgtccagccatgtttcacaggtgtgacctgtcagggaagaaccagagttccttgttctctcagagggtagagctcacagaggtcctctctggttcccaggaaaggtaatttcactaatcttggtgatgagactatcctccagtgctgatgtactatagagttttcatctgaagctgtcactgctatccccaatgtacatcttttcacacagaaatgtttagaggtcaggccatattctcagggttacacattgagaaggatggagatatattctactaccttctcctgagatctcacacacaatctcaaatttcaaaaggtctcagaagggcagctctcaggtactatttaaaaataacccacttcctgggacaggtagcatccttctaaccatgatggatgttctgaactacagtacacattgcatggatccaggtttgtctcaattcactgtgattattacactcagcagctgtttcaatatgtctgaaggggtaaatgacaatttaggtgacctgggtgtatggttggtgttatatgaatctttaaatgtagaacagtattaactgtattccaaaatctgtctttgatccatgatcacacttgtctcccagaccagctccttcagcacatttcctacctggaagaagaggactctgggtttggtgaggggaggccacaggaagagaactgagttctcagagggcacagccagcatacacctcccagggtgagcccaaaagactggggcctccctcatccctttttacctatccatacaaaggcaccacccacatgcaaatcctcacttaggcacccacaggaaatgactacacatttccttaaattcagggtccagctcacatgggaagtgctttctgagagtcatggacctcctgcacaagaacatgaaacacctgtggttcttcctcctcctggtggcagctcccagatgtgagtgtctcaggaatgcggatatgaagatatgagatgctgcctctgatcccagggctcactgtgggtttctctgttcacaggggtcctgtcccaggtgcagctacagcagtggggcgcaggactgttgaagccttcggagaccctgtccctcacctgcgctgtctatggtgggtccttcagtggttactactggagctggatccgccagcccccagggaaggggctggagtggattggggaaatcaatcatagtggaagcaccaactacaacccgtccctcaagagtcgagtcaccatatcagtagacacgtccaagaaccagttctccctgaagctgagctctgtgaccgccgcggacacggctgtgtattactgtgcgagaggcacagtgaggggaggtgagtgtgagcccagacaaaaacctccctgcaggtaggcagagggggcgggcgcaggtactgctcaagaccagcaggtggcgcgcggcgcccacagatcccgaggccgggtccggagcaggtgcaaggagggcggggcttcctcaacagctcagtggtctgtctcctcgccagcacctcagatgtccccaggactctctttctttattatctgtggttctgcttcctcacatccttgtggcagggaagaaaggaggaagacaatttttctgtttactgttgaggtttcaccaattactagaaactttcctacaagttcctgcatgactcattttgccatatatggattctcaccatctcttgatttgtttcatcaatcgaattgtgccctatttgaaattaacttactgaaaccttaaatccaatggatctatactggaattttaatgatgtaattgaggttaaatgtggtcaaagtgtgagaccctaatgcaataaaccgttgtctttataagaagaggaagagacaccagagacctctcacttttcacgtgcacacagagaagaggccatgtggagacgtagtgcactagaaggtggccctgtgcaagccaggaagaagccatactaagaaccaattttgccagctccttgatcttcgacattcagactgtagaattgtaagaaaatcaatatttgttgtttaagccacccaatcctgttgtcttcttacgaagacccaaactgactaataccacctaactctgttagctctgtctcctggagggagaagcagccccctgaggctgggcactgcatctctcagatttccacgtgaagtaggcaaaaatagtagttctcatataaaaatgtgtcatggctctgttggccatttttgagcatggtctctgaaaccagccctggtgtgtgtgtgtaacaaatgtcccttatcttttatttggacataacaaatagacgataggtaccagctggatggagattggccactgatcatcttctgttctccttagtatgtcacagaaaaccacaccaacatcaccagcatcactgtttttcttctaccacctcaaacggactacagaaatgatccctgcagtatggtctatttcttcggctttcgaaatttgcactgaatctcttcctaaatggggagctacatggggtctgagttttgttcctttcttcccagtcttccccaagtaccaaggacagaatagacttaaaatttggccatcaatgcccccaaacaccacatcactttctaaaatccacatcctgcatccatccttctctggacacccctcatcaggctacccaggaatggccagaatctggtatcagcttatgggctgaggccacgagttatacacatgtgtgatttcagtcacacacactctacttcaggaccacacctgtgttctgaggagctcaggcacctgctgatctcagtaattctctaataaatcacacacctcttattaataaaggtccagatggccccatcagctgcagagcagtggagtaaagctcatgggtgggtccatcaggcagaagtcagacaatggaagggatggctggtcacttccattttcactgatgttcgcaatgaattttaatggaataaaacaatattaactacaaagagacagaaaagaagactggctcgtcaagatatttaaggacaaggaactttatttggggggaaagtgaaagacacttctaaatggaaatccctaaagcacatacagcagctgacagagtggccactgtgcacatgagggctgaggagatggatggtagagtccattcctgcaacatgtctctgggtgtgtgatggttagactcctcatgcatatgaatataagagctggactcatggagaaaaaaagggccatatcccataggaaaggaagaaaaaaaaacagatgggcacccctggagagagctcattagatttggtgtgtttaagatgaaaatttcttccaaaaattgtaatgttctaagctaaatatgaatctcttcaataaactgagaataggagaatggagctaggacttgagagaggaaacaaatcttgagagagcagaaagcaaatccacaaaaactgtcacatgacagaggtcagaatggagctgatgtagctacttcactattctgcagacttattgaccatgtggagaaggggcttgaacaaatggagacgttctccaaccttctgaatcagcctccttcttatgcatgagtagaaatcatagttctgggggtgaccttcccaattttcctgtccatacctcttcccccaggggtagagtgtcttcccaaccacaatggtttctcaccagtgttctcagcttctcctccattgtacttaccctgcagattaagaatttcttctagatggagttctttgggaattttctgttttctttagtttctgttgactccaccacacccccataggatacaggttttattggatttcccctggaaatagtgggggtggatccaggcgttcaacagtcctcgctgttcttcccttcctgtcagcaccacaggacagcagataagggagttgactgtggatttttcaaattcctgggaaaagcctgcaaggactagtagattcacactctaataccattagcacatgtatccaaaaagaaacctcactaaatatttccaggttagcctgttcctctctcagtgccatccagtggcacctgccctgggttcacgaacatgtgggccccagtcctctctgctggcatctctctcctcacatttcagtcttctcgttagctctgtgaaagcagctcagatatgttaaaaggttttcttcttcatttattcagtttttcaggtttactgttaaggaggtcagaataagatcatagtttcctcatttttcacatttgcacgctgagtagccactttctatataaaagccagaaactaagggaacaaatcaaatatccatatccactacaggtgaacgttaaaaaatttgacatatgattatggactaaagtacaatgcagaattagaatcaaggcatcctcattctcataaaagcatgtctacattctcaaataactctgctgagtgaaagtagctgaagaattaagagtgcacttcataaacttctaattgtataaactgcagaaggtacaactattctaaagtaacagagcagatttgaaatttgggagaaatgggtgttgaaagtaattgggtggtgagatgaaattacagagaagtgacagaaagatttaggggttaacttaattgtacacaacctgattaaagtttgcacacatacgttaccattttccaaatggtgcagtgtagatttgaattaattattaattgtacttaaagcagtaacaaagaaacaaatgaatatgttggttgaggaggagcaaaaaatagatgggtatgaacactcaaaacatctcagactcttgaaagtacacatgcttgaacactggttttctctgtatactttaggtaaagagcagaatacattaaaagaaaacagagatgtcctggcgggggtggaatcctgcaaacctcactaggcgtgtcccacactgccctggagttgtctcaggggagcagtctcctctagtggtcagagacacaggcatggataatggggctaatactgtccagctgtgtgaccttgaacacattgtataaacactgttccatatgtaatttatcttccttaaaatgtaacattgacacttgcattaaatgtattctacaaatatgtcaaaaagaagatgacgactgctaaatgattatcaaggcacaatcatataatataatgatattttcctgagtgataagatgactaccaatctcccccagggcactttgtttgctctgagccctgcgcctcctcaggattcccatcccagagcttgctatacagtaggagacatgcaaataggtttctccctctgctgatgaaaaccagcccagtcctgaccccacagctctgggagagaagcgccagccctgggattcccaggggtttctatttggtgatcaggactaaagacagaggacccaccatggagcttgggctgagctgggttttcactgttgctgttttaaaaggtgaactagagagattgagcgtgagtggatacccttgagagaaatggtggattatgtctgggagtttctgaccaggatgtctacgagtttgcaggtgtctagtgagaggtacagctcgtggagtccggagaggacccaagacaacctgggggatccttgagactctcctgtgcagactctggattaaccttcagtagctactgaatgagctcggtttcccaggctccagggaaggggctggagtgagtagtagatatacagtgtgatggaagtcagatatgttatgcccaatctgtgaagagcaaattcaccatctccaaagaaaatgccaagaactcactgtatttgcaaatgaacagtctgagagcagagggcacagctgtgtgttactgtatgtgaggcaccaggtaagaggacatcagtgtgaacacagacacagtttcctgcaatgacaagggaggaggctgggctaaaaggggcactcaggacccactgaaaacgggcagctctagggcaggtacagatggttatcatgggctgctttccttcagggtctgtggcctcctctgcatctaccagttcccctcggagcctctggacatttatgtttctgtggccacccctgacatctctggattagaaaagtttattataggaagaggaaacattctcatttgtcccaaagcagatgtaagtaatggaagcaaaaaatgcacaggaggccaggcggggctgtagatactgtcaccccagaatgtcaatctcaccactagtactggagagggaagggagtttgatggaccttccctaacaaccctgtggtccaagataagtccaggaagaccattggtgcctcccagagcacagttgtccatcagggatgtccaatgcgtcccagcagcagccatgcctcagtgtctccactgtgcacagccactgtctgggaggagctcccaggatgggtgtctttggcacacaccaggtggcgggtgttagagtgcagtgcagcagctggctgcctgttctattgggctccctgatgctggagagatgggaggtgcattcgcagggccagcaccctgtttgtgaatttttatataaaaaccctgattttacttcatttttgcagatgacatagataactaaaaacagaatctgcaaagaaattgtaattttcaactttaccccaaattcattgtttcttaattctgtgcaagatccagacatattattgccttcctcatgataatttattctatgtaaaaccgaaatcattttttctcctactctttgtttctgttcaagtacagagatcttgagcaaagtaagttgggttctttccacacactaaccctcaccttccccagagaatgagcagagattgtcctcagtctgagtctaagggaggagctgtttctgcacaactcagagcctgcagagacccccaggtgcagcttcagtgaagtcagacatttctccatgtgggcgacctccagtgcctgtgactgctgctcaggcctaattgttggttaagtattacgacaccctttaggtgatcacatctcaagcctattctgaaaatcaccatgaacagagatagttcaatggccattctcctgacataagtttctctttattacttggttccaagtatggagaaaaatgtgaccctatatttgtctgaatccaacatcagcatccacggcattacgctaggagactcactaattgagcacaagtgagctcgttattctcatagaaatgtaagtatttggaaatttcagcgtgttctccagaacctgtggctgccaacaactgtatttctcggtgcactcttggcctggtgaagccttcacagaacctctccctcacctgtgccatctctgcattctccatcacaaccagtgtttccttctggagctgcatccatcagcgcccccatgggaggtactggagtggatcgggtgcataggtcatggagggagcacagattactcccctcttctcaagagtccagtcaccatctccagatccatgtccaaaaagtacttcttcttacaggtgaactatgtgagcaacaaacacatagccatgtattttagagcaaaagacacagtgaggaaaccacagtgtgaactcatacccaagcctcccctgtgggggtgcataggacagccagggttactcaggacaccaggctccctcaggacaccaaggggcactcaagaccattgtagaggcatgcaggtagctgggggctctcaggaaccatgggggaaaatcaggacaccaaagggtgcttggtacagcagggggctcaggattattgtggggattcagaaagagcaggttcaaggctcaacctcagggcatgtgcagctggtgtgaaaaggggctggatgaggcgttttgtgtcaccatcatgtttcaccaccagacaccctccactacctctattctaatgcatgtgtttgtatgattagaaaatgatattgatataaatatataaccatagctaggtgtgtcaagttgtcctctccatcttatatcagccttgtctgtaaggactaattccccataattacttgagaacctcataaattgtggtcaattatgtaggattcctctctttttctgccttccttcctccctccttctctctctcacacagaaacttatatacagccaccccacaacacacataaatctataacttttattacctgatgtattgataagtaatctaaagttacataaaaatcagtagttcactgtcaatattgtaggagaagggaaggtctaggaaggaggaattacagaacaagaggatattttgagggtaattgacttgttatctatgtggataatgataatgtctatgaccatatttgtaaaattgaacacttcgtgtggagactattatttttttatttaaccccatgccattattttgccgtattctagcatttctctaaaaatacagaaatgttcagcactcattcatgtgtatattcaggagtttctgacttttcatgtattttatttatctctgtctaattgctttgataccaaattttacctagtataattagtactacctttagcactgattataagtctcactcctccatcatctccttttttgccacacaagctgaatctagtttggactcataggagctgcttcattcaatgccagtgggagtttcaaaccctatcaacccccctataaactgtcattaagaaagtttatcaaactccaccagtcatgtgatattagttcgttttcacagtggtataaagaactacctgagacgaggagtttacaaagaaaagaggtttagttgactcacagttctgcatggctggggaggccacaggaaacttataatcatggtggaaggtgaaggcgaagcacggcacatcacacagggcagcaggagagagagggggaagtgacacatagttttaaactatcagctcttgtgagaactcactcactatgatgagaacaacatgggaaaactgccctcatgatccaataacctctcacctggtccctcccttgacatgtggggattagaatttgagatgatatttaggtggggacacaaaacaaatctatagcacatgtccagctgtgtcctggagttgtttcagggatccagtgtgtactgttgatagaaacagtgatcatcattctagccggtgtgagatggtatctccttgtggtttagatttgcatttctctgatggccagtgatgatgagaattttttcatgtgtcttttggctgcataaatgtcttcttttgagaagcgtctgtgaaaaaaaaaaagaaacagtgacaccaagctcacaccatccgttgtagttgacaacatgcaaagccaagagatctcaactgagatttagtgtgtgtgtcatgtctgatgaagtcataagctcagagcaagtgaatatggaaaagtgtattatctgcacagtgtaggtgtctgctgagtgcagggcaggtctcgcaggaaaatctaaaatggcttgaaagaagaggaaaggagactggctcagggtttttataatggtttagtggtggtggcacagtgaggcttcccactcacagatcggggtttataaggtttgaaactcccactgccattgaatgaagaagctcctgtgagtccaaactagattcaccttgtgtggcaaaaaaggagatgatggaggagtgagccttaagtaatcaacaggcatgcaccaaaagatagagcgacaacttattctaggtagcaagaataaaaataatgaaaaagaaataagggttcagtatgggtggacaagacccagatctacagaaatgagatgactttagaaatataaggaaataataatgagaaaaagaaggaggggatggggaattagggtcctggcctaatgtcttgggtagaagcttctcacaatcaaggactatcagcttattctgcaggtcttgggtcacacgtctgcttaaaaacatcagaaatgccaggcaatcaatgaggatgctcagtttagcatctcctatttgagtagatttacagttgtgtggaattcttaattgattctttttggtttgtttttagaggcaggctctcacactgttccacagcttaaagtacagttgtgtgatcatagctcactgtaattttgagctccggactcacgtaatcttcctgtattagcctcctgaatatctagaattagaggggaacgccacccctcacctgcttattctttaaaatattttttcatagaaatagcatctctttatgttgcccaggttggcttcgatttcctggtctcatgtgatttccctcactttgcttctgaaagtggtgtgattatagggaagatccactgcatctgtcctgaattgattcttcagttgtaaaacatgaagccaataattaactgcctgactgttttgtgcagtgagttagttaaaagtttctgataagattccttccaatatgattcaagagcagtattttctgctgatgttcctttcagtttccttgttgaagatcagaagacactgcggaaaagatgtagtaaaaaggcagttttaactcttcatgattggagtggatatcacataggaatccctttccgtattttgtaacacatgcatgcaatagaacaaagatgatcccttggtgtaaaatctataaacgtatgggccttttagctaccaagtcatagggtaataactgatggaccctgaggagtgaaccatgattccatagtgctagtgggagaacccttggccaaggaagtttacattttattaaaattgataatttttatgtagcgatgccattttttaaacattcccagaaggttgtgagtgggattgactctgtcttctgtgaacaatgacagtgccctccatggttagataatattttaaactagattgagctagagtggtttctgtattgaatcactatatttttttagcttcatgttagctttttgtgtgttagcatttgctttaaaatgatattaatcagccctctagtaggtagaaattcatctgagggtttcttcccttgttgtccatctcaataggatttccagaagacgtaagaaccctctctgtttctaaaaatattccaggctgggcgctgtggctcatgcctgtaaacctagcactttgggaggccgaggtgggtggacccctcgaggttgggagtttgagaccagcctggtcagtatggtgaaacctcatctctactaaaaatacaaaaattcgccgggcatggtggtgtacactcgtaatcccagctacttgagaggctgaggtgagaggattgcttgaaccctggaggcggcggttgcagtgagccgagattgtgccactgcacttcagcctgggcgacacagcgagactccgtctcaaacaaaacgacacaaaaaattccaaagttgtgcaccctctaaaagcatatgtacttaattctcatttttaatttattaaacatctctaataagttcaatgtttcctgccttctgagttgatttcctaacacatagaagaatatatcctaaatgaaagtttgtgttcttaatacaaattactagttaataacctttacttttattattgaggtattatacatcaatgttaatcaatcctctcaatgggactcttacctaaagaatatataaaatattttcctgatcatgacatataatagatgtgaacacattcttagcattcagccatgtctcttgtctattaatattataaaccacatgctaactttgattttattggtaattgttctaatttcttttttttcccacttctctggttgttttttttttaactttaagttttagggtacatgtgcacaatgtgcaggttagttacatatgtatacatgtgccatgttggtgtgctgcacccattaactcgtcatttaacattaggtatatctcctaaagctatccctcccccctccccccaccccacaacaggccccagtgtgtgatgttccccttcctgtgtccatgtgttctcattgttcaattcccacctaggagtgagaacatgtgttgtttggttttttgtccttgcgatagtttgctgagaatgatggtttccagcttcatccatgtccctacaaaggacatgaactcatcattttttatggctgcataggattccatgatgcatatgtgccacattttcttaatccagtgtatcattgttggacatttgggttggttccaagtctttgctattgtgaatagggaattgttctaatttcaaactagttaatttttatcttcatgcagctagattattatgtgtggctatttattccgagagggataaagacaacattaacaattttcactgcaggcatgtctaggcaactccctgtgcactatgaccctgggacgttggagattctatggggactcttccctacctgcctaggagagttctctgccttctacctctagcattttcctctttgaagaagtacatctaactgtcattagaatagagacaaagacaagtcttaactgcttccagctgaggagggatgctgtttggggaagatctctcttggaggtctaagggaccccaggaaaagggagccattatcccaggcttcagttgcatgaccatttggagtttgatggtctgaaaatgagaagaggcaaatctggttattagaagacatgtatgaaaaccaaacaaggtggcaaggacagcttgaaagaaaattccaaggctgctgacattcctagataactgcagctgtagttatgcctgctaaggtttgggcgcatggggcttggcttttgtcagctccctgggatttattttcccaaacaaagaaacctccaggttaggggcaccctattcattcccatcacctggcatgatttaaaggataattgcttagaattaaaatattgatccagattttttatattccccatcgctttttgtttcttctgggctgtagccagagatcattgattggcgctcaggaataagcagagttagtctaaaatgcaggcaaatacttaaacaactgaagagattagaatttaaagacaagtgtatgatatgttttgaaatacaatgtttctctttccagttttggtttttgtcggcagcaaataatgataagactgagttgtttgcaaaataaactttagtcttaaacttggcctgattatttgcataaagtgcagcaagaatattaataataattctgtaggaaaagcctgcaagcaccaggagcttcacagtctaacactatgagcacgtgcatcctcacgcaactcactgaatatttccaagccagcctgttccgatcttaaatgccatccagtggcatctgccccaggtacactaatacatgggtcctgcttctctctgcagcctcctctctcctcagatttcaggttttgtttattgtttgttttctctctgacatcaacacagatatgttgaaggttttcttttttttatttgtagttgttcagctttgttgttaatgaggtcagaataagctcatagtttacacatttttacattcccatgccgagtagctgcttttctctatcaaatccattaactgagagaacaatcacatttcgttacaggtgaacagttaaatagtttggcatatatttctgtgctggaatctaatgcagcttgaaatcaagtcatgcctcactcattgaaaaaaacatggctaaattctcaaagaattgtgctgagtgaaagaaactaaggaattaagagtaaattttacatgatacatttgtagaaattttagaagatgccactattataaattaacatggagaagatttaaatgtttctgagaatatgctattgggagtaatggggatgtgagttaaatttcagaggaataagagaaagatttagggattaattttttcaaaccttgattgaagtgctgagtaaatggttgcaaacataggtctacatttttcaaatcattcaccataaatttgaattatttattaattacactcgaataaagcaataaagaaactgatgagataatatttgactgaattgcatcaataaatagatcgatattaacacaaggaatataactgatttccaaaaacatacacatgaaccatggttcactctgcgtatttagataaattacagaaagttgtcataacagatggggaatcctgcagacttcactaggcatgggccatgctgccctggagttgtctcaggggagctgcctcctccagaggttagagcacaggcccaggtaataggactaaatttttagatgtgttatcttagacacactgcacaactgctgtgttctctatgtaaattatctcctgtaaaatataacattgaagcctgcattaaatatattgtgtaaatatgtaagaataaaagaaagttatgagagctaagtgttaatcaaggcacaagcatataagatataactatattttcctgaatgatggaattactaccagtctcccccaggacacttcatctgccctgagcccagcctctcctcagatgtcccacccagagcttgctatatagtgggggacatgcaaatagggccctccctctactgatgaaaaccagcccagccctgaccctgcagctctgggagaggagcccagcactagaagtcggcggtgtttccattcggtgatcagcactgaacacagaggactcaccatggagtttgggctgagctgggttttcctcgttgctcttttaagaggtgattcatggagaaatagagagactgagtgtgagtgaacatgagtgagaaaaactggatttgtgtggcattttctgataacggtgtccttctgtttgcaggtgtccagtgtcaggtgcagctggtggagtctgggggaggcgtggtccagcctgggaggtccctgagactctcctgtgcagcgtctggattcaccttcagtagctatggcatgcactgggtccgccaggctccaggcaaggggctggagtgggtggcagttatatggtatgatggaagtaataaatactatgcagactccgtgaagggccgattcaccatctccagagacaattccaagaacacgctgtatctgcaaatgaacagcctgagagccgaggacacggctgtgtattactgtgcgagagacacagtgaggggaggtcattgtgcgcccagacacaaacctccctgcaggaacgctggcgggaaatcagctgcagggggcgctcaggagccactgatcagagtcagccctggaggcaggtgcagatggaggctgtttcctgtcaggatgtgggactttgtcttcttctgacagttccccagggaacctcttaaatttagaaaactgtgcctaacaatgtcttctctatgcatatgaggaccttttctccctggcacaaaatgcagattgacgctgacacggatgaaaattcctcaaccatggtcacaaggatcagagtcctgagtaacctcagggcttcctggtgattcttctccaatcagacccaggacagggacctccgtgagattccctgactggaacagtctttatggatcctggtcacagacaatagagaggctgaaccagggtcagcgtcatgtagaacgtcacagatttcacgtctgatccttctcctgacacgaaagtatgcaaatcagtatcagcaccgatctggtgcttcttttgttcctaatccatttactttcttttttcgtcgtttttctcctttttccatttgtttttcctgctttttgcaaaaggaagatgttttccctgtgagatgcaggggatgacaattttgggagatggctggaacatccaatatcctcagggccgaccatcagtaagtgcaggctagaagtctcagaaagagctgaagctgcttaatcaccgtggagttttaccttctccagttctgctctgatggaatcagggccaagcaggttatcaatgataatctacctaacatagagtcaactgattccagtttcaataacgtctgttaaaaattcacaccaccacctggattactgttttgtcaaatcaatacacagtattgtccagctaagtagacccaaagacggaccgttgcccatggagaaaaacattaacctgagttctaggttcttacagtgttaaaggtgtaaaactgattattaaaaatgaggctatttttctttttgctgttgagttgtagaagtttcttttccattttgacatgaaaactttttcagatatatggcatattatccaattctgtaagttgtagttattttgttgctttgcagaatctttttcataatctattcccacttgttcaattctgcttttttttgtaggtgatttgaatgtaaaatcctgaaaaagattgctaattttttgagtgttgagagttttacaattagaggtattacagttagatatttgaggcatttggagtgaatttttgtgtttattctaacctaaaattcttaattcttttcatgggaaaatccagttttcataccaccctctttggaagacactacaatttagccatgttatattgatggttctcatgctaaaaatcagcttgtcatcaatatgtgggtttatatctaagctctatataggtatttaagccaaaactttctatgtttttaataaatgttgaggcctggaagtgaaatgcctaaagctttcttcttgccttgttacagatattgtaccaaaatattctaaccttttactattgagtgtaataatagctgtggcctttcttaacggcttttattatgttcaagttgttttcttgtcttcctactttgttcatagttttaataatgaaactgatttttttcaaagtctttttctgtgtctgatgaaatgttactgagatattttttctttagttttttaatgtgtaccaaactgattgatttgagaatgttgaatcaagtatgcatctcaggaagaaatttgagttggtcatggtgtatgtcttctaaaacactttggagcttagtttactattgttggggattaattcatgtctactaatgatattggtctgtagtttcctttattgtggtgcctttgtctattactggtaatactatcatggtagtctcatagaaagagtttagaaggtgtatggcagactacctttaaaatagattttatcagtggagaaatggtgatagttttttcttcacttttctgttgggaagaattttatgttgtttaaaagatattcagaatgacttaacctggtttatgagctttcattctattcctttcttccattctttttgaagaactgcttacctttcctatttatttttaagtttgtttttagacatatgcaatacattttgaggtgaaacctggtggaattttttccaataaattagtaaaaataaatcatttaattgactattttattcaggttgatttgtttaatatttgctaaaggccagttctttaagctatgacacataataaatcccaaatggcagtacctcattgtttacttagcttttgtacttatatttttcagaggaagaaccactactgtaaattgtaaatagccaatacataattgtattgtatgcaaatctgtgactgtttacagtgtcatctctgagaaacataaagtttatttactatatatatataaagagtttggaaggtggactccaccaatttttgaaagagttacagaagggctgctattacttctttaaatgttaaggttccattttatgatgtaacagataacctatcatggagaatgttcaatgtgttccttgagaaggatgtgtattacgtgactcttggttggaaggttctgtaaatatcattcagataaatttgttcaatagtgttgttcaagttccagaggcacattgagaattttctttctggatttgctaaacattatggtcatgaggtattaaggtcttgtgttatttttgtattgttttctatttctttatatctcttacagtttgcttaatgcagttatatttgtatttgtacacatgtgtaaaaacaaaaatcataattgctaaatgagttttatggcacagtcacattataagtaatatttttccaaatgctaccattgccactaaagtcctcctggagtctgacgtctgctctgggcactgccttcttctcaggcgtcccacactggagcttgctatagaggaggaggcatgaaaacaggcccctccctctcctggtgaaatcaagcccagacctgaccctgcagctctgggagaacagccacagccctgggattcccaggggtttccatttggtaatcaggactgaacacagagaactcactatggggtgtgaattaagctgaatttttcttgttggtattttaaaaggtgactcctagggaactagagtgagtgagagtgagtggatatgagtgagagaaacagtggatatgtttgccagtttctgaccaggatgtgtgtgtattttcaggtgttcagtgtgaggtggagctgatagagtccatagaggacctgagacaacctgggaagttcctgagactctcctgtgtagcctctagattcgccttcagtagcttctgaatgagccgagttcaccagtctccaggcaaggggctggagtgagtaatagatataaaagatgatggaagtcagatacaccatgcagactctgtgaagggcagattctccatctccaaagacaatgctaagaactctctgtatctgcaaatgaacactcagagagctgaggacgtggccgtgtatggctatacataaggtcccaagtgaggaaatatcggtgtgagtccagacacaacatttcctgcaaaaagaagaaaggagtctgggccgaaggggacactcagcactcacaaaacaggtgcagccccaaggcaggtgcagatggagggagggtaagggctgctttccttcagggtctgtggtttcctctgcttctaatatttcccctctgaacctctgtatatttatgttttgtgcccaccatgaggtccctggattagaaaactaatttaaaagaggaaatattctcatatgtcccacaaacagatgtaagttttggaggcataaaaatgcataggagccgcgtgagtctgtagacactgccaccccacaatgccagacccaaaactagtgctggagaagggtgggagtttgatggagcttccctgatgaccccgtggtccaagctaagtccagcaaggccattggtgcctcgctgagcacagttgtccatcagggatcctcccatgtgtcccagcagcagccatgcctcagtatctccactgtgcacagccatcgtctgggaggagctcccaggatgggtgtctttggcacacacaggtgatgggtgttagagtgcagtgcagcagctggctgcctggtctattgggctcctggatattggagggattggaggtgcattctcaaggccagcacgctgtttgttaatttttgtataaaaaccatgtgatttaattcattttctcagatgacatagataattaataacacaatctgcaaacaattgtaattttcaactttaccccaagttcattgtttcttaattctgtgcaggatccagacatggtattgcccttctcatgagaaattgttcgacctaaactgaaaccagttgtttctcatatactttggttctccccacatgcagagatcttgattagagcaagtttggtactttccacgcactcaccctcacctccccagataaagagcagaagttctccttagactgagtctgagggaggagctgttcctgtaccactcagggcctgcggagacccccaggtgcagcttcactgagtcaggtgtttcactccctgtgattgctgctcaggtctaattgtgggctcagaattaggacagtcttcaggttatcacagatcaatcatattctaaaaatcatcattatcacacaccgtggtaataattcaatgttcatttttctaaacagcagtttctcttttttatttggttgcaagtttgaggaaaggagcatgtgataatactttttaatctaacctcaaaatctactgaattgttctaggagactcacaaattggacaagagtgagctccttgtgctcataaaaaatgcatgtatttgggaatttcaccgtgttgtccagaaactgttaacatcaacaactgtgttttccagtgcacttctggcttgagacatcctcacagaccctctccctcacctgcactgtctctggattccccatcataaccagtgtgtcctgctagaattgtatctgcttgcccctagaagatggacaggagtggatcaggttcatgggttgtaaagggagcaaaaattacatcccacttctcaagagtccatatccagatccaagaaacagttcttacagctgagctctgtgcccagtgaacacacaactacacattttgaagcaaaagacgcaatgaagggccttcattgtgagcctagacacaaacctccctgcaggggtgaataggagcagcagggggcattcggggcagtatgggggcttagcatgattgttgggggtcaagatgagcaggatcaaggctcatcatcagggcaagtgcaacagggcagaaaaggggctgtagatgtgggttgttctcaccatcatatttcaccaccagacaccctccactacatctcttctaatgtgtctgagtgttgatatgattagaaaatggcatttatgtaaatactaatgtatacccaaatggaggtgcatccagttgtcctctccatcttatgtggaccttgtccatcaagggctaagttcctgtatttacttgattacctcatacattatggtcaaaacaggtagggtctcattttggcatggtctctcctcctcccttctctctgtcgcacaaaaacacatgaactgacacacacagagcttcccaacttcaattatctgatgtattgaagcaaattgattagtgtgcagcttttctgctttgcctgctattcatgttatgtaaaaataagacccgtgtgtttctcagcttgttacttctctaagctaagtagcatctttgtttattatacccagagaccaaaagcgattcagctgttattcagcagcttaactggtaaacaaattgtggaaaattcatttactggaataatacccactgttacaatgaagtactgctggatacactcagtaccatgcttaaaataacaagtacctgaataagtaaaataagtcaaacaaataaaagtgcatacatatgattccacttctataatttctataaagtaaaaatgaacttaaagttacataaaaagatctgtagttgactggggacatggtacaagaagagaaggtatagaaaggagaaacgacaggagagcaaaaggaaatttctaggataattttttctctgttagtaaaagtgaggattatgtcactatttgtaaaattgtacactttatgtaaaggttcttatttgctaatttcacctcattaaaatattgcaaattttaaaatatctaatttggtagaaaaggtagtagagagagatgaataaaatacataaaattcagagagtcctgaatacacacatgaatggaccctgggtctcactgtacttttagggagacactagaatacaaaaacataatgacaggatttcagtacatgaaaggagcttctcagaccccaggaggcctgtccaactgcgtctgggagttaactcagggagcaggcatgtcctttggaaggagcaatgacaccaagctcccagcatccattgtagccgacaccatgccaatgccaagagatctcgactaaaattttctgtggatgttgagtgtgattatgccacacactcacaccaagtgagtatggaaaggatagttacctgcatccttaaggtgtctgctgagagcagggcaggtctctcattaaggtccaaagtggcttgatagagcagggaaggagactggctctgggttgttatcatggcttggtggggagcggggcagagcatcctacttgcaggaagggttttgtggggtttcaaggtcaaattggcatcaaatgagggagctcctgtgatttctaactagatttaccttgtatgcttaaaaaaagagatgatggaggaatgagcctgaagttatcagcagtcaggcctaaacacagagtctgatgacttactctaaatagcaagtatacaaatgatgagtaagaaaagagacaagactccaatatgggtggacaacagccaggtctgcagaaaatgagaagactgtttataagcaaagaataatgagtaggatatggaggaggattctggtccaatgtcttgtgtggaagcttctcatgatttgagatcatcagcttattctgaaggtcttaggtcacctgtcttcttcaaaatatcagaagtgcctgatgatatgtgaggatgcacagtttaacttcctctatttgagtagctttacaattgtgtagagttcttaattaattaatttttttttttggagacggagtctcactctgttgtgcaggttggactgcagtggtgtgatcataacatagctcacggtgatttcaaattcctggctcatagaatcctcccacctcaacctcctgactagcaagtagctaggtttccagggcccttcatctacacttggccggttcttttcattctttttttttttttttaggtggagtttccctcttcttgcccagactggagtgcaatggtgccatctcagctcactgcaatctccccctcccaggttcaggtgattctcctacctcagcctccagagtagctgggatcacaggcatgtgacaccatgccccgctaatcttgtatttttatcagagatgacatttctccatattggtcaggctggtctcaaactccctacctcaggtgatctttccacctcagcctcccaaagtgctgggattacaggcgtgaggcaccgcaactggcctcttcatttttattcatatgttccttcagcagccactatgtcttcccactgatttcttcagtttctgccttttccttttgaataaggcattattcctaagggaagtcgggaggtgggcctggacagggacttggtgcattcctctctcccgtcccagttcttattggtttctccagtggctgtagaacagcagttttgatggctttacctctgcagataatttctcttgcaatgtagtgctgatggggaggtgtgtctggatgcacttcacctatagttgctgttttgctttcccagacagcaccatcccaaggggtagagggtggagcattttgtgatgtatccccagtactgaagaaaaaggcttcaatagcaggaggaattcctcaactgtatacactctgagaatttaaacaataacttctctatcatactcaaattgaaaccatccaatgaatatgtctactttaatcgtgtgctaacttaaatggcatttggcagcctctgtgccagaaaagattatcatctgctcctgtttatttccctgcaagtccttatctctcttcagatttcagatatattgtttgtcctataacatcaaaaatttgatgtatatgtgctaatttgcagatcagtaagtttagtagctgttgtaagaataataacatatttttatggggtgcttacatctccaagctgagaagcacctctatgtgtaatactaagaaactagaaatgatacaaatatcaagaagatacgtagataaaaagtaatggcatgctaatttactgtaataacatccatcatgagaatcaatacattgttgatgctcaacatgtttgcatcataagtagttatgtgcgagaagccacacaaatagaacacatactatataattcctgtataattcttgaaactcaaaactaaagcattaaatatgaaggactgactcagaatatggtggggaagaaaatatttgggaaggaggaattgtagaggaacacaaggaaacttttaagtgtaatttgtttgttcattatttggatggcttttggggatgcaaaggtgagcacgagtggaataacattttgttttgtttgtttgtttgtttttctgaagagatgtggtccttctctgtgacccaggctggagtgtagtggtgggatcatagttcaatgtagcctctaacttctggtctccaacaatactcctgcatctgccatctaagtagctggaactaccgttgtgtgccaggaggtttggcttggcttgagtacttattaaaccacacactttttgcaatatttaatgtatagtaataatgtctcaataagactattacaaatcaatgaatgaataatttgttcagtacagattcatggaaaaatagacactaacatgatgagtgtctgacatttatgaaaatacagctgcatgaaatgtgcttctctttacattcattaggtaaacacaatagtgcatacacatcacaccgtgctttcattacaggaagaaagttctgaaaatgtcactggggtgaaccacacggtgctgggcttggttcagggagcagtcaggcccagtgttgtgaccttcaaccacagaatccttaaaaaaaaaaaaaaaaaaaaaaagaggctgcctcaaagtccgcatcagttcccggactcgctatgtttctggatcgtatcagtgcatccggatctccctggtggctttagtgattccttgcttgccatgctgaggtctcgctgtagattatgttgggttttctaagaccgttttgctattgtaagatccactccctgggacagagcgattccctctaaacctgatagaggttctgaactaaaaataacattaagtgaatcctggtgtgtctgaactcaagtgattgttacattaagctgctgttccaatctgtttcctcacctgggaaaagaggagccaggacatagtgagttgaggccccaggaagataactgaattctcagagggcacagccagcatcctcctcccagggagagtctaaaagactggggcctccctcatcccttttcacctgtccatagagaggcaccacccacatgcaaatctcacttaggcacccacagaaaaccaccacacatttccttaaattcagggtcctgctcacatgggaaatactttctgagagtcctggacctcctgtgcaagaacatgaaacacctgtggttcttcctcctgctggtggcagctcccagatgtgagtgtctcaaggctgcagacatggagatatgggaggtgcctctgatcccagggctcactgtgtgtctctctgttcacaggggtcctgccccaggtgcagctgcaggagtcgggcccaggactggtgaagccttcacagaccctgtccctcacctgtactgtctctggtggctccatcagcagtggtggttactactggagctggatccgccagcacccagggaagggcctggagtggattgggtacatctattacagtgggagcacctactacaacccgtccctcaagagtcgagttaccatatcagtagacacgtctaagaaccagttctccctgaagctgagctctgtgactgccgcggacacggccgtgtattactgtgcgagagacacaatgaggggaggtgagtgtgagcccagacacaaacctccctgcagggaggcggagggggcgggcgcaggtgctgctcaggaccagcagggggcgcgcggggcccacagagcatgaggccgggtcaggagcaggtgcagggagggcggggcttcctcatcagctcagtgctctccctcctcgccagcacctcagctgtccccaggcctcctctttctttattatctgtggttctgcttcctcacatccttgtggtaggaaaggaaggaggaaggcaaattttcctcttacagtcaaagtgtcactaattactaggaactttcctacaagttcctgaatgtcccatttttccttcttaattaaaaaaaatatatattctaatacttctcaccatctcttgatttgtgtcatcagttgaattgtgctgtctttgaaattcaaatgctgaaaccttaaatccaattgatctatattggaattttaaggatggaattaaggttaaatgtgatcataagtctgagattctaatgcaatagatctgttgtctttataagaagtggaagagtcaccagagacctctcacttttcccgtgcacgcagagaagaggccatgtggagacatagtggactagaaggtgcaagccaagaagaagccgcaccaagaaccaaccctgccagcacctggaccttggacattcagacttcagaatggtgagaaaatcaatgtttgttgtttaagccacccactcctgttgtcttcttatgaagacccagacagactaataccacataactctgttagctcctggagggagaagcagctccctgaggctgggcacatctctcagatatccatatgaagtaggcagaaatagtagttctcatataaaaatgtgtcatggccctgttggccatttttttttgacggagtctcgctctgtggccaggctggagtgcagtggtgcaatctcagctgactacaaaccccgtctcctgggttcaggcaattctccttcctcaacctcctgagcagctgggactacaggtgtccaccaccatgccagcctattttttttttgtatttttagcagagacagggtttcactgtgttagggtggtctcaaatctcctcactgcatgatctgcctgcctcggtttcccaaagtgttgggattacaagtgtgagccaccgcacctggcccctgttggccattcttggggcaatgtctctgaaaccagccctggtgcctgtaccacaaaattttcttttatctttcatgtggatataacaaatggacaatgaggaccagctgcatggagactgaccactgaacatcttctgctgtctcctaagtaagtcacaggaaaacacaccaacatcaccaacataactgttttccttcaacttcctcgaacgaactatagaaatgatcccttaaagtatagtctattccttcaactttctcaatttgcactgaatcccttcctaaattaggagctacatagggtctgagttttgttccctttctcccagtcttccccaagtatcaaggacagaatagatttaaattaaatttggccgtccatgcccccaacaccacatcggtttctaacatccttgtcatgtacccatccttctgtgggcaccccacatcaggttggccaggaatggccagaaggtgtcatcaccttatgggctgaggctacaagttatacacacgtgtgatttcagtcacacacactctactgcaggacacacctgtgttctgaggaactcaggcgcctgctgatctcaggtcttctctaataaattacacacctcttatgaatgaaggtccagatggccccatcagctgcagagcagtggattaaagctcatgggtgggtcagtcaggcagaagtcagacaatgggataatagaagtcagacaatagtcactgaggttcccaatgtattttaatggaataaaacaatattagcaacaaaggggcagtaaagaagactggctcttgaaggtatttaaggaccaggaactttatttggggggaaagtgagagacacttttacatggaaagccctaaagcacatacagcagctgacagagtggccactgtgcacatgagggctgaggagacggatgataggttacgttgctccaagatgtccctgggtgtgtgatggttggactcctcatgcatatgaaaataagagctggactcagggagaaacaagggccataccccatagaaaaggaagaaaaaaagcagatgggcacccctggagagagctcattagatttggtaggtttgagatgaaaattacttccaaaggttttaatgttctaagctaaatatgaatctcttcaataaagtgagaattaaaagaagaatggagctaggagttgagagaggaaacaaattatgagagagcagaaagcaaatccacccaaactgtcacatgacagaggccagaatggagctgatgcagctacttcactattctgcagacctagttgaccatgtggagaaggggttcgaacaaacggggatgttctccaaccttccaaaacaacctccttcttatgcatatgcagtaatcatgattctcagggtggccttcccaagtttcctgttcttacctcttcccccaggggtagagtgtcttttccaacccacagtggtttctctgccatgtcctcagcttctcctccattgtacttaacctgaagattaaggatttcatctggatggagtttcctgggaatcctctgttttctttggtttctgatgaccacatcacaggccataggacacaggttttagtggatttcccctggagacagtggaggtgaatccaggcgttccacagtccttaccgttcttctcttcctgtcagcaccgcaggacagcagataagggagctgactgtggatttttcagatccccgggaaaaagcctgcaaggactaatagtttcacatctaacaccattagcacatgcatccaaaattaaaaaaaaaatcctcactaaatatttccaggttagcctgttcctctctcaataccataccgtggcacctgccctgggttcggtaacatgtgggccccagtcctctctgtaggcgtctgcctcctcagatttcagtcctcttttttgctccgtgaaagcaactcagatatgttaaaaggttttcttcttcatttattcataatttttcaggtttgttgttaatgaggaaagagtaagatcatggtttcctcatttttcacattcccatactgagtaactgctctctctctatgaaagccagaaattaagagaacaactcaagtatccatatccattacaagtgaatgttagacaatttgatgtatgattatgaactaaagtacaacacaggattagaatccaggcatcctcattctcataaaatcatggctgcattcacaaataactgtgctgagtgaaagtagctaacaaattaacagtgcacttcataaacttctatttgtataaactgcagaaggtacagctattctaaagcaacagagaagattacatattggtgggaactgggttttgaaagtaatggggtggtgagatgaaattacagagaagtgacacaaagatttaggtgtgaattgtacacaaattaattgaagctctgattaaagggttgcacacatgttaccattttccaaattatgcagtatatatttgaattaattattaattgtatttaaataaagcagtaacaaagaaacaaatgaatacatttattgaggtggagccaaaactaaatgggaatgaacactcgaaacatctctgactcttgaaaatacacaagcgtgaacactggttctctctatgtatttcaggtcaatagcagaatacactaaaagaaaacagagatgtcctggcaggggtggaatcctgcagacctcactaggcatgtctcacactgccctggagttgtctcaggggagcagtctcctctagtggtcagaggcacaggccgagataatggggctaactctgtccagctgtgtgaccttgaatgcattgtataaacactctgttctctgtgtgatttatcttccttaaaatgtgacattgacacttgcattaaatgtattctacaaatatgtcaaaaagatgatgactgctaaatgattatcaaggcacaatcatataatataatgatattttcctgagtgataagatgactaccaatctcccccagggcactttgtctgctctgagccctgcacctcctcaggattcccatcccagagcttgctatacagtaggagacatgcaaataggtttctccctctgctgatgaaaaccagcccagtcctgaccgcacagctctgggagagaagcgccagccctgggattcccaggggtttctatttggtgatcaggactaaagacagaggacccaccatggagcttgggctgagctgggttttcactgttgctgttttaaaaggtgaactagagagattgagcgtgagtggatacccttgagagaaatggtggattatgtctgggagtttctgaccaggatgtctacgagtttgcaggtgtctagtgagaggtacagctcgtggagtccggagaggacccaagacaacctgggggatccctgagactctcctgtgcagactctggattaaccttcagtagctactgaaggaactcggtttcccaggctccagggaaggggctggagtgagtagtagatatacagtgtgatggaagtcagatatgttatgcataatctttgaagagcaaattcaccatctccaaagaaaatgccaagaactcactgtatttgctaatgaacagtctgagagcagcgggcacagctgtgtgttactgtatgtgaggcaccaggtaagaagacatcagtgtgaacacagacacagatttcctgcaatgataagggaggaggctgggctaaaaggggcactcaggacccactgaaaacgggcagctctagggcaggtacagatggttatcatgggctgctttccttcggggtctgtggcttcctctgcatctaccagttcccctcggagcctctggacatttatgtttctgtggccacccctgacatctctggattagaaaagtttattataggaagaggaaacattttcatttgtcccaaagcagatgtaagtaatggaagcaaaaaatgcacaggaggccaggtggggctgtagatactgtcaccccagaatgtcaatctcaccactagtactggagaggcatgggagtttgatggagcttccctaacaactctgtcttccaagataagtccagcaagaccattggtgcctcccagagcacagttgtccatcagggatgtccaatgcttcccagcagcagccatgcctcagtgtctccactgtgcacagccactgtctgggaggagctcccaggatgggtgtctttggcacacaccaggtggcgggtgttaagagtgcagtgcagcagctggctgcctggtctgttgggcctgatgctggagagatgggaggtgcattcttggggccagcatgctgtttgtgaatttttatataaaaactctgattttacttcattttcgcagatgacatagataactaaaaacagaatctgcaaagaaattgtaattttcaactttaccccaaattcattgtttcttaattctgtgcaagatccagacatattattgccttcctcatgataatttattctatgtaaaaccgaaatcattttttctcctactctttgtttctgttcaagtacagagatcttgagcaaagtaagttgggttctttccacacactaaccctcaccttccccagagaatgagcagagattgtcctcagtctgagtctaagggaggagctgtttctgcacaactcagagcctgcagagaccccccaggtgcagcttcagtgagtcagacatttctccatgtgggcgacctccagtgcctgtgactgctgctcaggcctaattgttggttaagcattaggacactctttaggtgatcacatctcaagcctattctgaaaatcaccatgatcagagatagttcaatggccattctcctaacataagtttctctttattacttggttccaagtatggagaaaaatgtgaccctatatttgtctgaatccaacatcagcatcaactgcattatgctaggagactcactaattgagcacaagtgagctcgttattctcatagaaatgtaagtatttggaaatttcagtgtgttctccagaacctgtggctgccaacaactgtatttctcggtgcactcttggcctggtgaagccttcacagaacctctccctcacctgtgccatctctgcattctccatcacaaccagtgtttcctgctggagctgcatccatcagcgcccccatgggaggtactggagtggatcgggtgcataggtcatggagggagcacaaattactcccctcttctcaagagtccagtcaccatctccagatccatgtccaaaaagtagttcttcttacagctgaactatgtgaggaacaaacacatagccatgtattttagagcaaaagacacagtgaggaaaccacagtgtgaactcatacccaagcctccctgtgggggtgcataggacagccagggttactcaggacaccaggctccctcaggacaccaaggggcactcaagaccattgtagaggcatgcaggtagctgggggctctcaggaaccatgggggaaaatcaggacaccaatgggtgcttggtacagcggggggctcaggattattgtggcgattcagaaagagcaggtccaaggctcaacctcagggcatgtgcagctggtgtgaaaaggagctggatgaggcgttttgtgtcaccatcatgtttcaccaccagacaccctccactacctctattctaatgcatgtgtttgtatgattagaaaatgatattgatataaatatataaccatagctaggtgtgtcaagttgtcctctccatcttatatcagccttgtctgtaaggactaattccccataattacttgagaacctcataaattgtggtcaattatgtaggattcctctctttttctgccttccttcctccctccttctctctctcacacagaaacttatatacagccaccccacaacacacataaatctataacttttattacctgatgtattgataagtaatctaaagttacataaaaatcagtagttcactgtcaatattgtaggagaagggaaggtctaggaaggaggaattacagaacaagaggatattttgagggtaattgacttgttatctatgtggataatgataatgtctgtgaccatatttgtaaaattgaacacttcgtgtggagactattatttttttatttaaccccatgccattattttgccgtattctagcatttctctaaaaatacagaaatgttcagcactcattcatgtgtatattcaggagtttctgacttttcatgtattttatttatctctgtctaattgctttgataccaaattttacctagtataattagtactacctttagcactgattataagtctcactcctccatcatctccttttttgccacacaagctgaatctagtttggactcataggagctgcttcattcaatgccagtggttgtttcaaaccctatcaacccccctacaaactgtcattaagaaagtttatcaaactccaccagtcatgtgatattagttcgttttcacagtggtataaagaactacctgagacgaggattttacaaagaaaagaggtttagttgactcacagtgctgcatggctggggaggccacaggaaacttataatcatggtggaaggtgaaggcgaagcacggcacatcacacagcgcagcaggagagagagggggaagtgacacatacttttaaactatcagctcttgtgagaagtcactcactatgatgagaacaacatgggaaaactgccctcatgatccaataacctctcacctggtccctcccttgacatgtggggattagaatttgagatgatatttaggtggggacacaaaacaaatctatagcaacatgtccagctgtgtcctggagttgtttcagggatccagtgtgtactgttgatagaaacagtgatcatcattctaactggtgtgagatggtatctccttgtggtttagatttgcatttctctgatggccagtgatgatgagaaatttttcatgtgtcttttggctgcataaatgtcttcttttgagaagcgtctgtgaaaaaaaaaaagaaacagtgacaccaagctcacaccatccgttgtagttgacaacatgcaaagccaagagatctcaactgagatttagtgtgtgtgtcatgtctgatgaagtcataagctcagagcaagtgaatatggaaaagtgtattatctgcacagtgtaggtgtctgctgagtgcagggcaggtctcacaggaaaatctaaaatggcttgaaagaagaggaaaggagactggctcagggtttttataatggtttagtggtggcggcagagtgaggcttcccactcacagatcggggtttataaggtttgaaactcccactgccattgaatgaagaagctcctgtgagtccaaactagattcaccttgtgtggcaaaaaaggagatgatggaggagtgagccttaagtaatcaacaggcatgcaccaaaagatagagtgacaacttattctaggtagcaagaataaaaataatgaaaaagaaataagggttcagtatcgatggacaagacccagatctacagaaatgagatgactttagaaatataaggaaataataatgagagaaagaaggaggggatggggaattagggtcctggccgaatgtcttgggtagaagcttctcacaatcaaggactatcagcttattctgcaggtcttaggtcacacgtctgcttaaaaacatcagaaatgccaggcaatcaatgaggatgctcagtttagcatctcctatttgagtagatttacagttgtgtggaattcttaattgattctttttggtttgtttttagaggcaggctctcacactgttccacagcttaaagtacagttgtgtgatcatagctcactgtaattttgacctccagactcacgtaatcttcctgtatcagcctcctgagtatctagaattagaggggaatgccacccctcacctgcttattctttaaaatattttttcatagaaatagcatctctttatgttgcccaggttggcttcgatttcctggtctcatgtgatttccctcactttgcttctgaaagtggtgtgattatagggaagatccactgcatctgtcctgaattgattctttacttgtaaaacatgaagccaataattaactgcctgactgttttgtgcagtgagttagttaaaagtttcctgataagattccttccaatatgattcaagagcagtattttctgccgatattcctttcagtttccttgttgaagatcagaagacactgcggaaaagatgtagtaaaaaggcagttttaactcttcatgattggagtggatatcacataggaatccctttccgtattttgtaacacatgcatgcaatagaacaaagatgatcccttggtgtaaaatctataaacgtatgggccttttagctaccaagtcatagggtaataactgatggaccctgaggagtgaaccatgattccatagtgctagtgggagaacccttggccaaggaagttcacatttcattaaaattgataatttttatgtagggatgccattttttaaacattcccagaaggttgtgagtgggattgactctgtcttctgtgaacaatgacagtgccctccatggttagataatattttaaactagattgagctagaatggttgctgtattgaatcactatatttttttagcttcatgttagctttttgtgtgttagcatttgctttaaaatgatattaatcagccctctagtaggtagaaattcatctgagggtttcttcccttgttgtccatctcaataggatttccagaagacgtaagaaccctctctgtttctaaaaatattccaggctgggcgctgtggctcatgcctgtaaacccagcactttgggaggccgaggtgggtggaccctcgaggttgggagtttgagaccagcctggtcagtatggtgaaacctcatttctactaaaaatacaaaaattcgccgggcatggtggtgtacactcgtaatcccagctacttgagaggctgaagtgagaggattgcttgaaccctggaggcgggggtcgcagtgagccgagattgtgccactgcacttcagcctgggcgacacagcgagactccgtctcaaacaaaacgacacaaaaaattccaaagttgtgcaccctctaaaagcatacgtacttaattctcatttttaatttattaaacatctctaataagttcaatgtttcctgccttctgagttgatttcctaacacatagaagaatatatcctaaatgaaagtttgtgttcttaatagaaattactagttaataacctttacttttattattgaggtattatacatcaatgttaatcctctcaatgggactcttacctaaagaatatataaaatattttcctgatcatgacataaagtagatgtgaacacattcttagcattcagccatgtctcttgtctattaatattataaaccacatgctaactttgattttattggtaattgttctaatttctttttttttcccacttctctggttgtttttttttttaactttaagttttagggtacatgtgcacaatgtgcaggttagttagatatgtatacatgtgccatgttggtgtgctgcacccattaactcgtcatttaatattaggtatatctcctaatgctatccctcccccctcccctcaccccacaacaggccccggtgtgtgatgttccccttcctgtgtccatgtgttctcattgttcaattcccacctaggactgagaacatgtggtgtttggttttttgtccttgcgatagtttgctgagaatgatggtttccagcttcatccatgtccctacaaaggacatgaactcatcattttttatggctgcataggattccatggtgcatatgtgccacattttcttaatccagtgtatcattgttggacatttgggttggctccaagtctttgctattgtgaatagggaattgttctaatttcaaactagttaatttttatcttcatgcagctagattattatgtgtggctatttattccgagagtgataaagacaacattaacaattttcactgcaggcatgtctaggcaactccctgtgcactatgaccctggggcgttggagattctatggggactcttccctacctgcctaggagagttctctgccttctacctctagcattttcctctttgaagaagtacatctaactgtcattagaatagagacaaagacaagtcttaactgcttccagctgaggagggatgctgtttggggaagatctctcttggaggtctaagggaccccaggaaaagggagccattatcccaggcttcagttgcatgaccatttggagtttgatggtctgaaaatgagaagaggcaaatctggttattagaagacatgtatgaaaaccaaacaaggtggcaaggacagcttgaaagaaaattccaaggctgctgacattcctagataactgcagctgtagttatgcctgctaaggtttgggcgcatggggcttggcttttgtcagctccctgggatttattttcccaaacaaagaaacctccaggttaggggcaccctattcattcccatcacctggcatgatttaaaggataattgcttagaattaaaatattgatccagattttttatattccccatcgctttttgtttcttctgggctgtagccagagatcattgattggcgctcaggaataagcagagttagtctaaaatgcaggcaaatacttaaacaactgaagagattagaatttaaagacaagtgtatgatatgttttgaaatacaatgtttctctttccagttttggtttttgtcagcagcaaataatgataagactgagttgtttgcaaaataaactttagtcttaaacttggcctgattatttgcataaagtgcagcaagaatattaataataattctgtaggaaaagcctgcaagcaccaggagcttcacagtctaacactatgagcacgtgcatcctcacgcaactcactgaatatgtccaagtcagcctgttccgatcttaaatgccatccagtggcatctgccccaggtacactaatacatgggtcctgcttctctctgcagccgcctctctcctcagatttcaggttttgtgtattgtttgttttctctctgacatcaacacagatatgttgaaggttttcttttttttatttgtagttgttcagctttgttgttaatgaggtcagaataagctcatagtttacacatttttacattcccatgccgagtagctgcttttctctatcaaatccattaactgagagaacaatcacatttcgttacaggtgaacagttaaatagtttggcatatatttctgtgctggaatctaatgcagcttgaaatcaagtcatgcctcactcattgaaaaaaacatggctaaattctcaaagaattgtgctgagtgaaagaaactaaggaatgaagagtaaattttatatgatacatttgtagaaattttagaagatgccactattataaattaacatggagaagatttatatgtttctgagaatatgctattgggagtaatggggatgtgagttaaatttcagaggaataagagaaagatttagggattaatttattcacaccttgattgaagtgctgagtaaatggttgcacacataggtctacatttttcaaatcattcaccataaatttgaattatttattaattacactcgaataaagcaataaagaaactgatgagataatatttgtctgaattgcagcaataaatagatcgatattaacacaaggaatataactgacttccccaaacatacacatgtgccgtggttcactctgcgtatttaggtaaataacagagagttgtcataacagatggggaatcctgcagacttcactaggcatgggccatactcccctggagttgtctcaggggagctgcctcctccagaggttagagcacaggcccaggtaataggactaaatttttagatgtgttatcttagacacactgcacacctgctgtgttctctatgtaaattatctcctgtaaaatataacattgaagcctgcattaaatatattgtgtaaatatgtaagaataaaagaaagttatgagagctaagtgttaatcaaggcacaagcatataagatataactatattttcctgaatgatggaattactaccagtctcccccaggacacttcatctgccctgagcccagcctctcctcagatgtcccacccagagcttgctatatagtgggggacatgcaaatagggccctccctctactgatgaaaaccagcccagccctgaccctgcagctctgggagaggagcccagcactagaagtcggcggtgtttccattcggtgatcagcactgaacacagaggactcaccatggagtttgggctgagctgggttttcctcgttgctcttttaagaggtgattcatggagaaatagagagactgagtgtgagtgaacatgagtgagaaaaactggatttgtgtggcattttctgataacggtgtccttctgtttgcaggtgtccagtgtcaggtgcagctggtggagtctgggggaggcgtggtccagcctgggaggtccctgagactctcctgtgcagcctctggattcaccttcagtagctatggcatgcactgggtccgccaggctccaggcaaggggctggagtgggtggcagttatatcatatgatggaagtaataaatactatgcagactccgtgaagggccgattcaccatctccagagacaattccaagaacacgctgtatctgcaaatgaacagcctgagagctgaggacacggctgtgtattactgtgcgagagacacagtgaggggaagtcattgtgcgcccagacacaaacctccctgcaggaacgctggcgggaaatcagcggcagggggcgctcaggagccactgatcagagtcagccctggaggcaggtgcagatggaggctgtttcctgtcaggatgtgggactttgtcttcttctgacagttccccagggaacctcttaaatttagaaaactgtgcctaacaatgtcttctctatgcatatgaggaccttttctccctggcacaaaatgcagattgacgctgacacggatgaaaattcctcaaccatggtcacaaggatcagagtcctgagtaacctcagggcttcctggtgagtcttctccaatcagacccaggacagggacctccgtgagattccctgactggaacagtctttatggatcctggtcacagacaatagagaggctgaaccagggtcagcgtcatgtagaacctcacagatttcacgtctgatccttctcctgacacgaaagtatgcaaatcagtatcagcaccgatctggtgcttcttttgttcctaatccatttactttcttttttcgtcgtttttctcctttttccatttgtttttcctgctttttgcaaaaggaagatgttttccctgtgagatgcaggggatgacaattttgggagatggctggaacatccaatatcctcagggccggccatcagtaagtgcaggctggaagtctcagaaagagctgaagctgcttaatcaccgtggagttttaccttctccagttctgctctgatggaatcagggccaagcaggttatcaatgataatctacctaacatagagtcaaccgattccagtttcaataacgtctgttaaaaattcacaccaccacctggattagtgttttgtcaaatcaatacacagtattgtccagctaagtagacccaaagacggaccgttgcccatggagaaaaacattaacctgagttctaggttcttacagtgttaaaggtgtaaaactgattattaaaaatgaggctatttttctttttgctgttgagttgtagaagtttcttttccatttggacattaaaactttttgagatatatggcatattatccaattctgtaagttgtagttacttggttgctttgcagaatctttttcataatctattcccacttgttcaattctgctttttttttgtaggtgatttgaatgtaaaatccagaaaaagattgctaattttttgagggttgagagttttacaattacaggtattaaagttagacccttgaggcatttggagtgaatttttgtgtttattctaacctaaaattcttaattcttttcatgggaaaatccagttttcataccaccctctttggaagacactacaatttagccatgttatattgatggttctcatgctaaaaatcagctcgtcatcaatatgtgggtttatatctaagctctgtataggtatttatgccaaaactttctatgtttctaacaaatgttaaggcctggaagtgaaatgcctaaagcttgcattcttgccttgttacagatattggaccaaaatattctaaccttttactattgagtgtaataatagctgtggcctttcttaacggcttttattatgttcaagttgttttcttgtcttcctactttgttcatagtttttataatgaaactgatttttttcaaagtctttttctgtgtctgatgaaatgttactgaggtattttttctttagttttttaatgtggtgtaccaaattggttgatttgagaatgttgaatcaagtatgcatctcaggaagaaatttgagttggtcatggtgtatgtcttctaaaacactttggagcttagtttactattgttggggattaattcatgtctactaatgatattggtctgtagttttcttttattgtggtgcctttgtctattactggtaatactatcatggtagcctcatagaaagagtttagaagatatatggcagactacctttaaaatagattttatcagtggagaaatggtgatagttttttcttcacttttctgttgggaagaattttatgttgtttaaaagatattcagaatgacttaacctggtttatgagctttcattctattcctttcttccattctttttgaagaactgcttaccttttccttttaatttttaagtttgtttttagacatatgcaatacattttgaggtgaaacctggtggaattttttctaataaattagaaaaaaataaatcatttaattgactattttattcaggttgatttgtttaatatttgctaaaggccagttctttaagctatgacacataataaatcccaaatggcagtacctcattgtttacttagcttttgtacttatatttctcagaggaagaaccactactgtaaattgtaaatagccaatacataattgtattgtatgcaaatctgtgactgtttacagtgtcatctctgagaaacataaagtttatttactatatatatataaagagtttggaaggtggactcctcaccaatttttgaaagagttacagaagggctggcattacttctttaaatgttaaggttcattttatgatgtgacatataacccatcatggagaatgttcaatgtgttcttgagaaggatgtgtattacgtgactcttggttggaaggttctgtaaatatcattcagataaatttgttcaatagtgttgttcaagttcagaggcacattaggaattttctttccggatttgctatacattatggtcatgaggtattaaggtcttgtgttatttttgtattgttttctatttctttatatctcttacagtttgcttaatgcagttatatttgtatttgtacacatgtgtaaaaacaaaaatcataattgctaaatgagttttatggcacagtcacattataagtaatatttttccaaatgctaccattgccactaaactcctcctggagtctgacgtctgctttgggcactgccttcttctcaggcatcccacactggagcttgctatagaggaggagggagggcccctctcctggtgaaaacaagcccagacctgaccctgcagctctgggagaagagccacagccctgggattcccaggggtttccatttggtaatcaggactgaacacagagaactcactatggggtgtgaattaagctgaatttttcttgttggtattttaaaaggtaactcatagggaactagagtgagtgagagtgagtggatatgagtgagagaaacagtggatatgtttgccagtttctgaccaggatttgtttgtattttcaggtgttcagtgtgaggtggagctgatagagcccacagaggacctgagacaacctgggaagttcctgagactctcctgtgtagcctctagattcgccttcagtagcttctgaatgagcccagttcaccagtctgcaggcaaggggctggagtgagtaatagatataaaagatgatggaagtcagatacaccatgcagactctgtgaagggcagattctccatctccaaagacaatgctaagaactctctgtatctgcaaatgaacagtcagagaactgaggacatggctgtgtatggctgtacataaggttccaagtgaggaaacatcggtgtgagtccagacacaaaatttcctgcaaaaagaagaaaggagtctgggccaaaggggacactcagcactcacaaaacaggtgcagccccaaggcaggtgcagatggagggagggtaagggctgctttccttcaggatctgtggtttcctctgcttctaatatttcccctctgagcctctgtacatttatattttgtgcccaccatgaggtcgctggattagaaaactaatttgaaagaggaaatattctcatatgtcctaaaaacagatgtaagtattggaggcataaaaatgcataggagccgggtgtgtctgtagacactgccacccccaatgccagacccacaactagtgctggagaagggtgggagtttgatggagcttccctgatgaccccgtggtccaagctaagtccagcaaggccattggtgcctcgctgagcacagttgtccatcagggatctcccatgtgtcccagcagcagccatgcctcaatctctccactgtgcacagccattgtctgggaggagctcccaggatgggtgtctttggcacacacagttgatgggtgttagagtgcagtgcagcagctggctgcctggtctattgggctcctggatattggagggatttgaggtgcattctcagggccagcacgctttgtcaatttttatatgaaaaccatgtgatttaattcattttctcagatgacatagataattaataacacaatctgcaaacaattataattttcaactttaccccaagttcattgtttctgaattctgtgcaggatccagacatggtactgcccttctcatgagaaactgttcgatctaaactgaaaccagttgtttctcgtatactttggttctccccacatgcagagatcttgattagagcaagtttggtactttccacgcactcaccctcacctccccagataaagagcagaagttctccttagactgagtctgagggaggagctgttcctgtaccactcagggcctgcggagacccccaggtgcagcttcactgagtcaggtgtttcactccctgtgattgctgctcaggtctaattgtggctcggaattaggacagtcttcacgttatcacacgtcaatcatattctaaaaatcatcgttatcacacaccatggtaacaattcaaggttcatttttctaacggcagtttctcttttttatttggttgcaagtttgaggaaaggaacatgtgataatactttttaacctaacctcgaaatctactgaattgttctaggagactcacaaattggacaaagtgagctctttattctcataaaaatgtgtggttttgggaatttcactgtgttgcccagaacctgttaacatcaacaactatgtttctcagcacacttctggcttgagactccttgcagaccctctcctcacctgcactgtctctggattccccatcataaccagtgtttcctgctagaattgtatctgcttgcccctagaagatggacaggagtggatcaggtgcatgggttgtgaagggagcacaaattacaacccactgctcaagagtccatatccagatccaagaaacagttcttacagctgagctctgtgcccagtgaacacacaactacgcatttttaagcaaaagacgcaatgaagggccttcattgtgagcctagacacaaccctccctgcaggggtgaataggagcagcagggggcattcggggcagtatgggggcttaggatgattgttaggggtcaggatgagcaggatcaagttcgcatcagggcaagtgcaacagggcagaaaaggggctgtagatgtgggttgttctcaccataatatttcaccaccagacaccctccaatacatctcttataatgtgtcggagtgttgatatgattagaaaatggcatttatgtaaatactaatatgtacccatatggaggtgcatccagttgtcttctccatctgaggaggaccttgtccatcaagcactaagtccctgtatttacttgagtacctcacacattatggtcaaaacaggtagggtctccttttggcatggtctctcctcctgccttctctcttctgtcacacaaaaacacgtgaactgacacacacacagagcttcccaactttaattatgtgatgtattgaagcaaattgattagtgtgcagcttttctgctttgcctgctattcatgttatgtaaaaataagaaccatgttttctcagcttgtcacttctctaagctaagtagcatctttgtttattatacccagagaccaaaagcgatccaactgttattcagcagcttaactggtaaacaaattgtggaaaaatcacttactggaatcatacccactgctacaatcaagtaatgctggatacacccaacaccatgcttaaaatagcaagtacttgaataagtaaaataagtcagacaaataaaagtgcatacatacgattccacttctataatttctataaagtaaaaatgaacttaaagttacataaaaagatctgtagttgactggggacatggtacaagaagagaaggtatagaaaggagaaactacaggagaacaaaaggaaatttctaggataattgatttttttctctgttagtaaaagtgaggattatgtcaatatttgtaaaattgtacactttatgtaaagattcttatttgctaatttcacctcattaaaatattgcaattttttaaatgtctagtttggtagaaaaggtagtagagagagatgaataaaatacataaaaatcagagagtcctgaatacacacatgaatggaccctgggtctcactgtacttttagggagacactagaatacaaaaacataatgacaggatttcagtacatgaaaggagcttctcagaccccaggaggcctgtccaactgcgtctgggagttaactcagggagcaggcatgtcctttggaaggagccgtgacaccaagctcccagcatccattgtagccgacaccatgccaatgccaagagatctcaactaaaattttctgtggatgttgagtctgattatgccacacactcacaccaagtgagtatggaaaggatagttacctgcatccttaaggtgtctgctgagagcagggcaggtctctcattaaggtccaaagtggcttgatagggcagggaaggagactggctcagggttgttatcatggtttggtggggagcggggcagagcatcctacttgcaggaagggttttgtggggtttcaaggccaaattggcatcaaatgagggagctcctgtgatttctaactagatttaccttgtatgcttaaaaaaagagatgatggaggaatgagcctgaagttatcagcagtcaggcctaaacacagagtctgatgacttactctaaatagcaagtatacaaatgatgagtaagaaaagagacaagactccaatatgggtggacaacagccaggtctgcagaaaatgagaagactgtttataagcaaagaataatgagtaggatatggaggaggattctggtccaatgtcttgtgtggaagcttctcatgatttgagatcatcagcttattctgaaggtcttaggtcacctgtcttcttcaaaatatcagaagtgcctgatgatatgtgaggatgcgcagtttaacttcctctatttgagtagctttacaattgtgtaaaattcttaattaattaatttttttttgagacggagtctcactctcttgtgcaggttggactgcagtggtgtgatcataacatagctcacggtgattttaaattcctggctcatagaatcctcccacctcaacctcctgactagcaagtagctaggtttccagggcccttcatctacacttggccggttctttacattctttttttttttttttttaggtggagtttccctcttcttgcccagaccggagtgcaatggcgccatctcagctcactgcaatctccccctcccaggttcaggtgattctcctacctcagcctccagagtagctgggatcacaggcatgtgacaccatgccccgctaattttgtatttttagtagagatgacgtttctccatgttggtcaggctggtctcaaactccctacctcaggtgatccttccacctcagcctcccaaagtgctggaattacaggcgtgaggcaccacacctggcctcttcgtttttattcatatattccttcagcagccactatgtcttcccactgatttcttcagtttctgccttttccttttgaataaggctgttactcctgagggaagatgggaggtgggcctggacagggacttggtgcattcctctctcccctcccagttcttattggtttctccagtgtctgtagaacagtggttttgatggctttacctctgcagataatttctcttgcaatgtagtggtgatggggaggtgtgtctggatgcatttcagctgtagttgctgttttgctttcccagacagcaccatcccaaggggtagaggctggagcattttgtgatgtatccccagtactgaagaaaaaggcttcaatagcaggaggaattcctcaactgcatacactctgagaatttaaacaataacttctctatcacactcaaattgaaaccacccaatgaatatgtctactttaatcgtgtgctaacttaaatgacatttggcagcctctgtcccagaaaagattatcatctgctcctgtttatttccctgcaagtctttatgtctgttcagatttcagatatattgtttgtcctataacatcaaaaatttgatgtatatatgctaatttgcagatcagtaagtttagtatttgttataagaatagtaacatatttttatggggtgcttacatctccaagctgagaagcacctctgtgtaatactaagcaactagaaatggtacaaataccaagaagatacatagataaacagtaatggcatgctaatttatggtaataacatccatcattagaatcaatacattgttgatgctcaacatgtgtgcatcataagtagttatgtgcgagaagccacacaaataaaacacatactatgtaattcctgtataataaattctcgaaactcaaaactaaggtattaaatgtgaaggactgactcagaatatggtggaggaagaaaataattgggaaggaggaattgtagaggaacacaaggaaacttttaagtgtaatttgtttattcattatttggatggcttttggggatgcacaggtgagcacgagtggaataacattttgttttgtttgtttgtttgtttttttctgaagagatgtggtcctactctgcgacccaggctggagtgtagtggtgggatcatagttcaatgtagcctccaacttctggtctccaacaatactcctgcatctgccatctaagtagctggaactaccgttgtttgccagcaggcttggcttgagtacttattaaaccgcacactttttgcaatatttaatgtatagtaataatgtctcaataagactattacaaatcaatgaatgaataatttgttctgtacagatttatggaaaaatagacactaacatgatgaatgactgacatttatgaaaatacagctgcatgaaatgtgcttctctttacattcattaggtaaacacataggtgcatacacatcacaccgcgctttcattacaggaagaaacatctgaaaatgtcactggggtgaaccatattgtgctgggcttggttcaggaagcagtcaggcccagtgttgtgaccttcaaccacagaatcctaaaaaataataaaagaggctcccccaaagtccccatcagttcctggactcgccatgtgtctgggccgtatcagtgcatccggagctccctggtggctttagggattccttgcttgccatgctgaggtctcgctgtagattatgttgggttttctgaggccgttttgctatttaagacccactccctggcacagagcgattccctctaaacctgatagaggttctgaactacaaataacgttaagtgaatcctggtgtgtctgaactcacatgattgttacattaagctgctgttgcaatctgtttcctcacctgggaaaagaggagccaggacatagtgagttgaggccccaggaagataactgaattctcagagggcacaaccagcatcctccttccagggagagcctaaaagactggggcctccctcatcccttttcacctctccatacagaggcaccacccacatgcaaatctcacttaggcacccaagggaaaccatcacacatttccttaaattcagggtcctgctcacatgggaaatactttctgagagtcctggacctcctgtgcaagaacatgaaacacctgtggttcttcctcctgctggtggcagctcccagatgtgagtgtctcaaggctgcagacatggagatatgggaggtgcctctgagcccagggctcactgtgggtctctctgttcacagtggtcctgtcccaggtgcagctgcaggagtcgggcccaggactggtgaagccttcggacaccctgtccctcacctgcgctgtctctggttactccatcagcagtagtaactggtggggctggatccggcagcccccagggaagggactggagtggattgggtacatctattatagtgggagcacctactacaacccgtccctcaagagtcgagtcaccatgtcagtagacacgtccaagaaccagttctccctgaagctgagctctgtgaccgccgtggacacggccgtgtattactgtgcgagaaacacagtgaggggaggtgagtgtgagcccagacacaaacctccctgcagggaggcggaggagccggcgcaggtgctgctcaggacgagcagggggcgcgcggggcccacagagcaggaggccgggtcaggagcaggtgcagggagggcggggcttcctcatcagctcagtggtctccctcctccccagcacctcagctgtccccaggactcctctttctttattatctgtggttctacttcctcacatccttgctgcaggttttaacagtcactggcacccttttttcaacaaattcccacaaggcccattttaccttcttgacaagcaaaatattctaaggcttctcactatcccttgattggcgtcatctactgcatcgtgtctttctcttaaattcatgtgatgaaaccccaatcccagtggctctgtattggacagagggattttaagagggcaaataagttaactgtggccataaatgtgggaccctaatccagtaggactcttgtccttatgagaagtggaagacatcagaggcctctctctccacatgcacacagaggagagtccatgtggggatgcgctgcatgagaaggtggccctttgcaagcctggaagaggcctctcaaaaaacttaccctttctgcacccagatcttggacgtcaagactccagaacaataagaaaattaatatttgttatttgaaatagcctagtctgtggtatcttctcatggaaagccaagtagattcagagattcaattgtgttagctccgtctcctgcatggagtagcagcccaccgaggctggacacatctctcaaattattttcataaagaaaaatagatccaagatgaaaaccccaccacatttctgctgagccattcacttagcagcagtctctgagatcagccctgggggtatgttctaggtcgtgtatctcactttccactatgagaatccatgtagataatgagaaccagccagatggagtcctgatccctgcccaccttctgcttccccccaagtgacacacggtcacagaaaaccactccagcatcaccctgtgtcttgtactctctaaaatcccactaaagctgaccctaaactaggagctatttggggctggactcattctgttcttagtcttccataaggtccaggtgccgagtagagcctcagtaaagagtgagcttcaattcccctaacccacatcattcccttacatccttgtcatgcacctgtcctctgcaggcacccagggcaggttacacaggaattgcctgaagctggtctcaggtgccctgctgagaccactggttatgcacacgtatgatttcaggtcatgcaggctcttctgcaggacagacctgtgtcctgtagagcacagacacttggtgacccaggccctcctctaataactcatacatctcatgtcagtgtatatccaggtgccccctcagtgcagcacactagggtgattaccctcacaggtggctttttcaggcggtgaacagaaaatggggtgggcacgctggtcattcccatcatcggtgatatccaagtgaattttaaataaatgaaacaaaactaacaacaaaggggaaggatatgtacctgtatctgggaggtagactgggtcccagaactgtactgggagtgggtgtgaaaggcccttttgtgtgggaagccctccagcatgagtgaaagctgaaggaatgatcactgtaggtggagcctgatggagaagctggcagggtacatttcctgaagctgttcccgggtgcgtgatggttcaatggcccatgtacatgaagaggagggctggactcatgtaggatcaaggaaactaccccatggcaatggaagaaaagaaaatggagatggacacccctggaggcagcttattagctttggtggaggaacgatgggaatttattccaatgaccccagcatcttcagctaaatatgagttgcattaacagacagaattatgaagggaagggagaaggagtttatagagggaaaaagcagaacagaaaaaaagaactacacaagtctatcaaatggcagatgacagagtgtagctgatgcagctacaccacacttcccggaacctaccagagaccttgacacccctgtaaggcaggtctagtggtgatgcacttgtccactttttgctttttggagaaacgtttgaaacatcctacattactgaagaaaagctttaattagtgtaatatttttacttgacagttttattggttttgttttattttcagcaacttgaatagaatcatgcacatcatgatatttgggtgaacaacaggccacatacacgataatgatctcattaaattataatactgtattttcactgcatttcttccatacttagatatgttcatatatatacatacctaccatggtgattcaactgcccacagtattcactacacttacatgatgtacagatttgttatctaggagcactatgctatcccacacagcctgggtgtagcagggtatttcacgtatgttcacgtaaacacactctatgatcctcgcatgatgacaaattgcctaaggacacattgctcagatgtatccctactgttaagctacacatcattgtatctcatctctctccatttttggtctctgataaaattctcgtgttgtttttgcattcttctctgagctcattgaacacatttataaggtttcctttgaattttctgccaggtaatcaatatacctccttttaatttgtgtcagtttctagtgctttgctttgttacagaatttggactgctttttttctctttcattattattatcactttgtacattctctgttgctttctgctcattagaaggaaaagccatggtaaccactcttcacagaatatgctcagggcaaatgccatcacctgttagcccagtccatgatagtggtgtctcttaaaatttcatactggtccaaactttttgttgttgttgttagtggcactcagacctatagaggattttaagttttcccctactctaaattaggtggcatcaaaattcatcctgcaggcagtctctgataaagtggagaaattggacaaagttttagcatgtatatggttcataaaaataatatgagtttaaggttttctcagccagttgctacatattgatattttataatcatttctttgaatgtctctggagtttatcttttgaaaatttagatcagaatatataccaggtttgaggcttcttgtctggcttaacgatctcctataggtcagcgtgtgaaaaggcacagagtctatctgaagaggagaactcagggaagccccaaaacaacagaggagacaaaactgaggactttgaggaatctaaagcttctgggacctgcagcctccagacatgctcagcaccctcttgttatccacggactaatttctttctcttttctgagtggtattttctagggttcccgtcctccactttgacactttggtatgtccatgtgtgtccattgtgtttcagccagggacacagaaccaggaaaacatcatggcttttctagagggagctgacctgggtaatcaacagttggagtagaaagtgcctttgtccatgtgtcacaggcctaagggccatgggcaggaggtcaggaagagaggatgaccagacggctggggaaaccaggatgaacaaagccactctccttcctggtgagaaggggcatgtggaagcctggtgtccctgtagggctgaaccacactcacctgcccactgctacctgccagcgaggtgacccacagagcagcagcagctcctgagtcactcacagaggctgcctcctcctccaaaccctccagtgtatgtgcttccataagtgtgagccccagcagatcccaaagttttcaatgggttcatctagctagtgtctgtcctcagccccatccccaggctcctgccctggttggtgtccacagtgtcccagcagcggtgacagtgacagccagggcctgcactttccagagcagcaagtttggaagaatcaagtcccagaaccagcctggatttggggcaaacacacaaatttcactctgaggggaagtgctggaaagtagccttgagtcttcctcagctcacctgtggctgatcctctgcatcccatcagcgatacatgagccctccccaaccccagcgtggagctgtttcaatcgcagcaggatgggaatgtgtcttctttctggggactttttaagcacagctcttatgttcctgagatttgaggtttataaaggtgtgtcagtcacccacagagtggacctgcacaagtaagacaaggacaggatccccaggagaggcacctcatatgagacgggacaggcaggtcccatcacagacactggtcctcagaaaccctgaccagctactcaccttcccaggtcacctgtgtgtgatcagttcctgtgtttgctcctgaaaagatccccatcaagggtccccaggtcctgcccccttccttgatgtgcctctgggagtggggctggctgggctgtgggtctgctgtgactttccccacaggtcagcggctcagtgcaggctgcgccaactcggtggggctgggctgtggccgaccctcccagggggagcctggatgcttctcgggggcatctgcaggatcccaggttctgggagaacagggaagccacagtgtgtgcagggccccatctccaggtgtaaagtgtttgctgtcactctgttgacaagggcatatccccaggcgcaggggcactgtgggtgcacaaccaatgtggtagacacagagagtgaggcacatatccctcccattactgtggggaatataggcactgtgtgtgtgtgtgtgtgtgtgtgtgtgtgtgtgtattaggagttttgcagtgggctctgagccccgtgattttgtaggtttagaaattatctgatgagatgttcatccacaggaaccgacaagagattaggtgttctcccaaagcccctgggagctcctggactcattgtgagtgtggactgatccattgcttccagagctccacagaaggggctccctggtggtttcatagaatccttgcttggggtctttctgcagagttcactggctttcctacggccagtttagtattgtaagagatggtgtcagcagcacatggtatcacatgtcactaaatgagcattctgagccaggacacagcatcttcatactggggggagggaaatgctttgggagcccagacaggagcctctctgcagtgcaagggctgggctgcagggggcgctcaaggcccacccatcacaggctccacccccagagcaggtgcaccggaggctggggagggattcctctcaagatctgtgtcattcttctaaaaaaaatctaaaatgagtatttgacaaagactgctgaacattctataaatatcctattcaattgtgagcatttatcaaatttgatgttgtaatgagaaccacttttatactagatatttctaaccctgctagatatcttaatagtatgcagctggaggttaagcaagcttttcttttatataaataagtgcaactttggagaaacacactcatcccccgaataagacattcatgtattaaagcctagaaatactttaaattacctctgagccattcaagtgtgtgttcacagtgaagtcctgttctagggaaaattgttctccagggggagaagctttgtcaacatagagcttagggatgtatcaggaggcacatgacctctaaggggattatagcttgaacccttagcatcctcctgttggtaatacatgtgtcactctccaatctttctcatgcagtatcaggtatgaaataggatcgctcatgaatatgcaaataactgaggtaaatatagatatctttgtgccttgagagcatcatccaacaaccacaactctcctcagaagaagcccctagaccacagcacctcaacatgtactggacctggaggatcctcttcttggtggcagcagcaacaggtaagggacctcccagtcaccgggctgagagagaaaccaggccagtcaagtgagacttcacgcactcctgtctcctctccacaggtgtccactcacaggtgcagctggtgcagtctgggcctgaggtgaagaagcctggagcctcattgaaggtttcctgcaaggcttctggatacaccttcacaagctatgctatcagctgggtatgacaggcccatggacaagggcttgaggaaatgggatggatcaacaccaacactgggaacctaacgtatgcccagggcttcacaggacggtttgtcttctccatggacacctccgtcagcatggcatatcttcatatcagcagcctaaaggctgaggacacgtgcaagaggcacagtgtggaaacccacatcctgagagaaccagaaatcctgagggaggaggcagctgtgctgagctgaggcagtgacagggacaacgtggctgcaccctttgttgacatagggttatacacatacatatatatgcacccaacactggagcacccaggtatatcaagcaaatacaattagagataaacagagagatagacccaataccataatagctggagactttaacaccccactttcagcattggacagatcttccagacagaaaattaacaatgaaatcttagactaaatctgcatgacagaccaagtggacataatggatattgatggaacacttcatccaatggctgcagagtacacaatcttttcctaagcatatggatcattctcagggatagaccacatagtagaccagaaaatttgtcatttttaattaaaaagatatcatgtaccttctctgatagtaatgaaagaaaactaaaataataagaggaattttgaaaacacatggaaattaaacagtatcctccttaattaaacaatgtgcttccaaactgaactatatgctctaaaatgggttaataaagaaacaaacaagaaaattttacaatttattgaaagaaatgataatgaaaacacagcgtatgaacacctatgaaatacagtgaacatagtactaagaggaaagttcacagctataagcacctatgttaaaaaagtagacaattataacataaacatcttaggaatatctctcaaaaaaaactagaaaagcaagagcaaatcaaaatccaaacatagtaaaataaaaaagttaagatcagaacgttaataaataaaattgaaataaataaaacaataccaaagatcgatcaaatgaaaagttgttttttaaaaagataaaagacatctataaacctttaaccagaccaagaaaaaaaacaaagaagaccaaagtaaataaaatcagaaagaaaactggaaatattacaaccaatagtgcagaaaatcaaaggatcattagaggctactaggagcaactaaatgccaataaatcgaaatatctggaagaaaaggataaatttagagacacatacaacctaccaagattgagccaggaagaaattgaacaggatcagtaacaagtagtgagagtgaagccataataaaaggtctcccagcaaagaaaaaacccgggacttgatgacttcatcactcaattatgacaaacatttaaagaagagataatacctaatctcactcaaaatattccaaaaatagataaaaagtagataaggaagggaagaattcttccaaacttactgtacaaggccaatgttacccttatatgaaaaccagataaagccataccaaaaaaaaaagaaaactacagttcaatatcactaatgaatatggatgcaaaactcctcaaggaattcttagcaaaccaaattcaataacatatcaaaagagcattcatcatgaccaagtgtgggttatcccagagatgcaaggatggttcaacctatgcaaatcaatcaatgtgacacatcgtatcaacagaatgaagggcagaagacgtaagatcaggccttaccttgttctcctcactcaaagtctaccattagttctttggtcctcttgaccagtcctgctgtacttggtctcccgtgattctgttcccaggtcctgaaacactgggcttctgcacacctggagtctctctctttgaacatggagaccctgtatcctcagagagggatgatgcctcattgtggctcccatgccccatgcaaacaattcttccaacacagtcatgatttttcctgttggaaattgaaaggggatgtgggaattgatgtgtgtgtgtgtgtgtgtgtcctcaggcctgttgggcctgttgagaacacagcagggctctatgtacaacaggaaagcaatgttttctctataccatctattttcttataaagtgttcataggtaatcaaaaggaaatgaatcacagtttataagatgttgtggactggactgatgttgtcactcaaggctactatgggggctccaggaaaagaaacctagaaaaggataagactgtgagcaaagaagcaaaacctgggaagcagcagggagagggtgagcaggggtgactcaactggggagggataacaccacttaccacagagggtgaaaactccgtgctcagcaaagaggagaacttactcagcatttcccctaatcctccctccagaagcgcgactgccaggaaagttcacaatgtatcatctccagctgggaacccaaaagaaacaggagattttagggcataggtcctgggcacaaggtgtttccctggttcctaccccttccctctctgtccagcaaaactgcttgtttctatcacttgccttcctgtccttggggtaagaatggatgctttgacactcagcagagggatgctctttcagaggaggaatgagtttgtgttatctgatgtctgagcaggacactcacctctgggaagaggctccaagacagaaggtcgccgtggttcctgccccttatatgtgaggggctcttgacacatgcacacttttcctcaaactctgtttataccccagcaacaatgctgggtgttgtcagcctctctcctccccagatactgctctatcatcagcttgagcacagtttccccatgaaaggcattattctctctctcaagaagatcaactttttacatgtcttcgatggatgacagtttctctgtgtgagaatctagaaataagaaatggggtaatggggacaagtgagctctctgtgtgactcactaggaagtccactgttattccaggtgtcctgtcccaggtgcagctgcaggagtcaggtccaggacccatgaggccctcagacactgccctctgcctgtgctgtgtctggattcttttttttaccatggatattatttgagatgaatccaccatcccgtgggcaacaggctggaatggctggggcacagttactagactggatcatcaaggaatacacatcatgcaccctccacccaggtccatgtccccatcaacagtgactcaaccaagagccagttctctgtgaagctcagctccatgaccacctaggacacggctgagtattactgtgaaagactcagtgaggaggtgtccttatgagccctgacacaaacctgtcagggcacttaggacctccaggaagactcaagaccaccaaggggactcacgaccacttggggaagggcaggttgcagtaagcacagggccagccccagagcaggtgcaggtggagatgagaggctggtttactgtcagggtctggggctgcttctccatttagatgtttccttcagagaccctcccttatttcatgatgctctgcttagctgtaagtctctgaaatatcacagttttgttgtaccaggaggaaaccttctctcaggtgctaaatgtagaacaatctctctgccagtggttgccagggtcacagccctgtggaagctgaagggtacccagtgagtcttctccagtcacattcaggacaggaaccttagtggggttccctgaggagaacagtctttaggaattctaacctcagccaagagaggctgggccagggtcagtgtcaggtagaacctcacaggatttacgtctgaccctcctcctgacactaaagcatgcaaatcagtatcagcactgatctggggcccctttggctcctagcccattctatttcttgttagttgtcttggttgttgattttcctttgggtgttcctgatccctgtaaagtggagacgtggttcctgctgtaaaaattccagggcctcaagccctttccctgcagctcaggtggggctcagactgtggctcctgcaaccacgtgggagaggctgatgggactatcttctctcccgttgctcagaaccctccagtgtgttgtgtggagactcacctgggaatgcaagtggccaatagttgtgaaaggtatgcgcttgtttggtcaaagtggaatgtggatgtggaatttatcctgtgttgtgcaaactaacacaggttcaccttcctcacctgtagtgttagaaagagtgtgaaagttgtaagaatcaaaacagagccacttgtgttaacaccctgacaaatggacctaggaatgaacatgaaggagggttcttaggcccatattcctgataacaaaaactatcataaatagactctgcttagccaccatcttggatagaagcccaccacaaccttattaaaaattacacttgcaagaacatcagctcagaaactggctgttcaaccttacactgatgccaccattgctattgattctacaactatatgataattatctcaaaacaacttttgtgacccacctcattttcacttcataaacctgtggattgacatgttggagttactgctgcatttgtagataatgataaataataaggccttttaacaatgtttgaagctgctattctctgatatctcttctaaaataaagaatttccaagtggatgacaatgaaaaaattgttagaaatatttggtggtaaggcatctttaacatcctgttgaatgtttctgcatagcacatcaatcccttaaaatactttgctatatctgcatttaatgaatgagtctaatattgaggtgcaattgaaaatacctgggcctttgatgaatcagctcatagggtgataatgtctgggtccttgagaaagcagaccctgtgttgtaagttttagtagaagtaccttttgcaaagaaagttcatgtgtttctgaacattatgctacttttaacttaagaatgcaatatatgatttatttttacttcaaactgggtatatacccagtaatgggatcgctgggtcaaatggtatttctagttgtagctccttgaggaatcaccacaatgtcttccacaatggttgaactaattttcactcccaccaacagtataaaaatgttcctatttctccacatcctctctagcagctgttgtttcctgacttggtaatgatcaccattctaactggaatgagatggtatctcatcgtggttttgatttgcatttctctaatgactagtgatgctgaacattttttcatttgtctgttggctgcataaatatcttgttttgagaagtgtctgttcatatcctttgcccactttctgatggggctgtttgttttttccttgtaaatttgtttaagttctttgtagattctggatattagccctttgtcagatgggtagaatgcaaaaattttctccgattctgtaggttgactgttcactctgctgatagtttcttttgctgtgcagaagctccttagtttacttagatcccatttgtctattttagattttgttgtgattcatacttggttaatttttaattgcattgttttcttctgattagttgtaagtatacctgcatattgatcaaaaaagccgtttaacaaatcaaaaggaaacatttaacaaatacgtgacttggaagtattttctccaagtctgttgttgtcttttactcccttgtcagtgtgtattgcagaaaaatatgtatgtgtgtgtgtgtgtgtttacaaattaaagaaacaggtataatttcatttatccatagatcacgtctttggcattacatctgaaatctcatcataaaatatactaatagtgatttttttttccatgtctctaatctcaggccacaatctactcatgagtgtttaaacatcacctacttgattagaggactatcaccctaagatatttggaatatttctggaaggagatgtgttctttttcccattatttcctctatttagtcatttattaatatccgtattggtttatgaatgtctatttcatactctgaagtaaatccatgctatattattcattttattgttcaaatcaccacagctttattatgtgcttggaactcatttagtttggatgctgcatccttacagcacacctcatcattttgtttttgaacactttcctgtttcctggtattacaatacattctaagcccattttctatattaactttttcatacatagaatcagacatttttctaaagattgcttctttctgatgttaaaatatagtattaaaataaaatttgtgatactgggtatatgtgttgttaatgtggtataagtacttttaggacctctcaaccaactggcctagtaaatgtgcatgtttatatgaactcatgtttaaggacacattgaaactatttatgtatcttatattctgtaactttattacattaaaaatgagaatacactggtctcctcacccaactatgttaccaccatatcgacctttctaggcttccttgactgtccataatcacccactgcaaagtgaggaaccccatcccatcatatgccattgtattactagctgcacatttcaggacacatgcattgcagcatcagaaatgtaaagctgtacccttcttggagccatttttatctactagaatagagtgcttatgtgcagtttctttacactttaaacttatagaatttcctcattttcaaagttccttagatcagcaacttcgttttccactttcttcatgaagtcatttcaattacactgtataatttctttatttgaattctgtaaaagccgaaaactacagtcaagtaaacatagagaggatattccaggaatttacagagtgggtatcaaataagttaaaaaggcaatgtttaagaagagtaaaactatttttagtgatatgcgatggttgagacatgacacaattaatttgtctaagctcataattttgtgatgaaaaatataaacctaaatatatacaatttaaaatgatgtttagcagtacattatccctaggatcaaatgcagactgtataaaattatctaataacttatttggtgaggatgccatgagacacatgcaacggaggatgaactaattttccttatttgcatataagatgttgacattcactaaagatctttaatttaaaaaaaaatcaattttctatgtgacccaggttttttcttccagacaagcaaataacccacaggattattttctttccttgattgagaaagattttccccaaacttcagctcagttcaggcatatactgtccctaaatgggcatttaccctcagatgagtccacacacctgtcaacacgtggagtcttctgtcagacaaacacacctttactgatgtggattcttccctcagacaaaaacacatgtccccacatggacactttcctcagactaccatgtatgtccttacatttacgctttcctcagaaaacagacttttcctcatgtggactcttgtctcagacaagcaaatatgtctccatgtgaactcttcactcagataagtacacatatgtccacatttactgtttccctacacaggcacatatattcaatgttgaattgttttgtggcaaaatgatctcaagataatggtaattataaaccccctccctaataaagtgtagatctgtattttttttgttgtaacctaactttgccttattgtcacaaacagtaatttgcagctctaaatgcaccagttagagacaggtgtccattttctctggaaatgtatttttattttcttactggacatatttgttgataatgttgctactatgaagatacctgaacagtatccacattaaagaataaaaaagagtaatgggcagaataaccctgtgcatccagacccagaaatccgttgaccctgccctcccgaaatgaagacacagaggatggatgagcagtgctgagcagtgtacccatgaccacaaacatgaagacatggaaatgtgtccccactcctcctcatgaaaggcagctcatgccctcttccttcaggccctggtatggagccaccccatgtctctgcccttccttagtgtccacaccatggggtctgcactgatctggattcccttctcatccccctcaatattagtgtgccttgtgaatcaggtccagctgtggctgttctcagtctgtttcctctgtattcacagaagtcctgtgtgatgtttactgatggagtcagaaggagaaaaatttaacagcccagcagttcactgagactgtcctgcaaagcctctggtttcgggtttactgggtgcagcatgagcttggtccagcacgcttcacaacaggaattggtgtgggtagcaacagtgagagatcatatgggagttctaagggttactctccatgagtacagataaatcaacattcccaagtgacaccctttcaagtgcagtctaccttacaaggaccaacctgaaagccaagggcaaggccgtatattacagtgagggacacaggggagggaagatctgtctgagcccagacacaaaaatctctgcagagagacaggagggaactgcgtggtagatgctgctcagaaccaccatggggtggccaggaaacaaggggtgcttaggacctctagggagcgctcaggacgccaggggggtgctcagaaccactaggggacgctcaggacactaggtggcgctcaagacaacactgctgcactcatgtcaccacggggtactcagaaccaccagggggcgctcagaaccaccagagggcgctcagaaccaccaggtggcgctcagcaccaccagggggcgctcaggacaccagggggcgctcagaaacactcggggacactcaggacaagagggggtactcagaaccaacagggggcgctcaggaccaccaatggttgctcagaaccacaagggggcgctcaggacataggtggtgctaaagacaacaattctgggctcaggtcaccagggggcgctcagaaccaccaggggacgctcaggacatgcaggttctcttaggaggcagctgcacatcaggagcttcagaggctgtgatttcctttcagaccctggaaattcctgacctggtcaagcaaaagtcttccccaggatgtctgatttttccttttaattccatgatttcttttacctacaaaacactaacttagaacagggatgtaatgcaacttttattgctgcgtattttctgagtaatactagcaatgatctctcgggacaattattaaaataggttatttatatattttaattattaaaaataatactattattaaaatagtaaaattttttaaatcacacttgtaatcccagcacttggggagactgaggcagacagattacttgagctcaggagttttagaacagcctggcaacatggtgagatgctttctatacataaaagaagaaatagctgagattggtgcaaccagctacttaaaaggctgaggagggaggattccttaagcctgggaggttgagcctgcagtgagctatgattgtgcctccacacaccagccttggtgacagagtgagaccctgtcttagaaaaaaaaatgcatatcctcaatacagactatttccatgaatagagttttgtgtttttgtgctgtaatagtcaaacaattgtatatgttttctaacgttaactcagcatatgcatggtgttgttgtttctttttctttcatctgctgtttgtggagaataaacagcactttaaaggctctgtttctccactttgtttggcttccagtgtcctgtttttcagactgtttctccaccttcccttcttctttgaaagccatttatcttcctcagtctccatgcagagaaagaaagtccctttactttctgtcttccaagtctggtgaatcagttcccttcttttcataatcactgaagccaaccaagtttagaagtataacagttctccttagaatacgctcatctacctgcactctctgccctcctcatccttttctaggtccctccagacatcaccctcatcccataccctcccttccttaagtaccacagagtgggctcttcacctcctgctgccctctatgtgctcagccctggggctcactagtcctttgattatgaagtccaaatccctatgtgcttgcacactctcacgccaccctctaggaagctgccattgtgagagagtcctgaaaagcagggctgggtttagttccataatgccatattatgggtcaattagttatcctagtgaacatcctatttaattaatagatagagttaattaaatagagttattcctatttaattctattaaactattaataaattagttattcaatttattaataccaggccaatatttaaaataaataccattgcacgtttaagtgacatatttgacaataattgcatttacatacagttttaccaaaacatgtatcgaagtgtatttgtttttttaaatattggaataggcagacatacacataggaaaacattattttgtactacaatctcaaactgcaaacacaatttaaatgccattaaataattagaataatatgaaacaaatgggcatggtgttttggtgtttaaatatacattcatttcacctgatcatacttatgtgtctttgctgggctgctgtgcatgtatgtgtatttgtatgaccatgaagctttcagatacatcattaaattacataaagtgttaccatgcacttccctcttttaggggacaaagtaaatctttcagggcaatcgcagggaaaatgtgtggttggatcttccacacagagtccctaccatgacattgccaagtagagctatggaagggggctaccaacctccagaccccagaatggtagatccacaggcagcttgcagctcgagtctggaaaagccacaggcacccagctccaacccatgagagcagccttatgggctgcattagggaagtcacaaaggtagggctgcccaaggccttgggcacccacccttgcaccaggtcacaagacatggagtcaatgattattttagagccttaagattgaaggactgtccgactaggttttggccttccataaaaatctttacccaatttttgggccattttctctttttagcataggactcctcacccaatttctgacccatcattgtactttggatgtaaataacttatttttgatttttcagtctcataggtgaaaggaacttttccttgagtctgaactttggattttgaattaatgccaaaacaagttcagattgtcagggaccactggggagggattattgtatattgcaatgtaagaaagacataaggggcagaatgatgtggtctggatgtgtgttttctccaaatcttatgttgaactgtgaaccccagtgttggaggtgaagtctgctgggaggcatggcattaggggcatatccctcatgagttacttcgtgtcatccccttggtgatgaatgagttatcagttcacatgacagctgattgaaagagcctggtaccactcccttctcttatcttcccccctattgtcatgtgacactcttgctccccttcatcttctgccttgactgtaagctttctgaggcactcagcagaaacagatgtcagcaccacacttgctgtacagcctgcacaactgtgagccatataaaacctatgtcctttataaattatccagcctcaggtatttctttacaattcaataatggacaaacaaaaaaattatttaattgtgcagcaaattaggggtgtggaatcattaaaatggacttaacgcctgtaaaggtaaaaacacaaaagtctctctctctctctctctctctctctgtgcccttctctgtgtgtacatacacacacacacacacacacacacacacacacacacacacacacacgctccacgtgaagatgtcatgtgaccaaatagcaatatggtggctgctatgagccaacagtagaagcctcaaaataaaacctatcttgccagcatgtttatctttgaatttccagaattgaggaactgagataaaattaaggttgtgtaagttaccaagtatgattgtttttaatgtttgaactgactaaagagaatttgggatgaagaagtggggttctgatgttacaattatttcaacactgtggaaagtgccttggaattgggttatgtgtaaaaggctggatagttttgacatgcataaagaaatttatatattaagtgtcattctgatagattaaaatgagtagagtgctattggaaactggataaatggtgatctttgttataaagtgacaaaaaaaacttgtctagactatgttgtgatatttagtaaaagagaactttgagcagcaaaattgaatatttagctgagaacatttctaagtaaaatgttgaaagtgtagtttggtttctcctgggcatttataataagaaatagatgaattgaaaatgaaattataagggagaaaatatccaaaacttaaaggcttggaaaattctcaatctatctgtgttgcaaaaatcagaaagtgcgttctgaagagaacagtgagtatgaggctgtaatatcacttgataaagaatttatggtattaaaagagaataaatgcaggttttaaagaacaaggatggagatgagacaaaatggacgaatactgtcagattcttcagatttaagaggatggagctacttggttgcaaatgtgcaccattcttccagaacaaagaaaaataaaccttgaatttatttagaagtaatcatgaccactaccttggtttcaacagaccagaccatccatgcttaaaaccttgaggaaaagacctcctaccactgcctggaacttaggaactcccagtgagccttgtgtgtaggcctgcatggggtctttgggatgggaccttaacccagcagttacccattggtgcctctacttaaagcattggaattaattctgctgctccaatgagctgggaaagaagaagcttggcccagagaagattccacttgagccttaaggtctatggtaatttgttttgttatgtgttgtacttgctggggacacatcacccctcctttcttttctatttttctctttgggggagaaaatgtctattttatgcctaactcaccactgtattttgaaatcaaataacttgtccagagctatggactgaatgtgtatgcaactccaaaattaatattgtggaaccctaatccccagtgtggtgtaattggggtgtgggccatttaggaggtgatcaggtgaaaaggttgaagccgtcataaatgagattagtgctctaataaaaagtcacgggagagcttttctctcttgcttccctgtcatgagatgatacgataaaattacggccatctgcaattcaggaaggaaacctttacatacacatgattggctgtcttgggcttcccagcattcggcactgcacagaataaatatgtcttgttaaagtcatgcactttatgacactttgttaaagcagccccaataaaataagatatctggttttactggctcagagttggagagaaatttgtttcagaaataattctacctcaaatcttactcatgtatggtttagttaatatttaaattatgttttaaacttgtttagagttgatgatgaaatgagttaagagtttggggactgttataatcaaatgaatgaactgcgaatgtgtaaatgccatgcatttgggggatggtcttttctattctgggtctttcatgcctacgtgtgaattgaaggattgcttttcttatttctgtgaagaaggccattattattttgatagataatttatctaatctgtaaataactttgggtagtatgaaaatttcaatactattaattcttccaatccataaatgtggagtatctgggatatatgtcctatttatgtgtgtccatttcattttctattaccaataatttatagttatcctctagaaatctttctcttatttggtaacatttattcctaggtatattttgcagctattgtaaaaggaaaggcttcatggatttcattctcagatgttttgctgtcaacatatagaaatgccaccaattattgtatgtagatgatgaatcttacaactttacttaatttgcttatgaattctaatagtttgtgagaaggctttagttttctttttttaatataagatctttttgtctgctcacaggaaatctgacttccacaattccaaatttgaggtcatttccttttactgttaactaaatactctggctagcatttcagtactattctgaataaaagtgataaaaatggttattttggtcttcttccacttcttagatgaaaatttcccggtttttccatgcttcgtgtgatgaaagctgtgtttttctcatatatgcgctttatttttggagatatccttcttgtatacctaatttttgataatttctatcagaaatgaatgttgaattttattctatgattttctaaaatatcttgactacacaataacacagtaatatgcaggtcaatacatatcaactgaatttcacttaatatcatcccaacttctaatatttattttttagtattagaacatgcctgtttccatattatatttgctcacaggtattggtacatattttagctaatttgtcattattttactctaagaaataactcaaaaaatcatttttattatgaattgaaaggtaacatcggcaaaattagcccaatcttaatctttcccagactttgaaacattattgaagacaatgaaggggaaagtcagctttagttgagcttctaagaggtaagtgaggtaaaaacccagggcttattggctacgactttgaatgttactgtcttcttttccataagccacatccagaccattttctaaatctaagaaaactaattttatctcactgcttcttagtcttgtttcctgcagctgacaaccaaaactgtcagcgatagagcccagtgtaaatcaccagcctttaattattgcagaactatgattttacaacaacattgtgagttacataatgatcctactttatggccgcggtgcaaatgcttaacttccactaaatcacagagctcagaatggctagcatggaggtgtatatgtatatgtgcattgttctagaaatttccaattactgtatattattgtttgcagtaattaggtcaatctgaactgacaaaagtctccatggccttataagcacagagaccacctccacggcaggtggaaatcaaggctgggaacaggctaccagctgctcccctgggattcctccaattaccctgtttaaagcctctgctcactcatgcgctggaagagggatgtcagagatgcagcctactcttcctaaagggctgacagggcataaagacaagactgattatccatggaacattcctataggaatgcacctatgtgcaggcacactaataagctgtgtgtcttgcagtgtgtaaatggctgagatgccatttacacttctttacacaatacatttttaaatgtttgggtgatgtattctctatcattcaaaaaaatcatcactttccccctaaacaaagaggatttttatcagaacacttatgggaagccccttgctctcccagattcccaccctcatttctcctgaaggaagaaagaaaaccatctctattgatttccactctcatcctctaggactaaaaccagaaagctgcatgctccctgggtgagccttagagaagaccctgtctgtaggagcaggaatctcagagccttggctgagaggcatggtcctgaaatgagatggagtcccccatggagatcccacgtggacgcccacacctgagggctcactgctcctcaccacagatgcactcccctactgagtcctgagacctgagtgcaccccatagagtaggactcagatgagggaatgcaaatctccaccagctccaccctcctctgggttcaaaagctgagcacggggcctcgctcagtgactcctgtgccccaccatggacacactttgctacacactcctgctgctgaccaccccttcctgtgagtgctgtggtcagggacttcctcagaagtgaaacatcagttgtctcctttgtgggcttcatcttcttatgtcttctccacaggggtcttgtcccaggtcaccttgaaggagtctggtcctgtgctggtgaaacccacagagaccctcacgctgacctgcaccgtctctgggttctcactcagcaatgctagaatgggtgtgagctggatccgtcagcccccagggaaggccctggagtggcttgcacacattttttcgaatgacgaaaaatcctacagcacatctctgaagagcaggctcaccatctccaaggacacctccaaaagccaggtggtccttaccatgaccaacatggaccctgtggacacagccacatattactgtgcacggataccacagagacacagcccaggatgcctcctgtacaagaacctagctgcatctcagtggtgctccctccctacctctgcagaacaggaaagtgtgactgagatgccatttcctgccagggcttgtgtttcctataccaaccagactcagagccctgtctgttttcctattctgtactattaaatggcatgttccctgttagtgattcacgcaagcagaggctgtatcctgtttgacaaagattgagcatgaaagattcccattacctgggccacatgcatcactgatatgtggccacttatttcttgagctcatatccttccaaggggctgaatacaaatatctataacataggccatcttaaactgcaggaagtaatgttggagaagaatgtggagataaaagagcaggatgattaattaaaatccagataccatctttttttgcagagaaaaatttacactaataaagtaattttatgaaacaacaagaaagatggaatgtgtcctcatcatggagtgtctcacttgcagtgcacaaataaatttctaaaaattttatagggaagatgtgatagatgaggctgatttccacacagggagtgattaaatacccaggtaagtataaaatccaacacttggaaaggaaaatgcctcagcttgacatcagaaacccagctcagtaagtctgaggagcaatgcggaaaagaaatgaaaaattcgacaacacttttcttatgaaatccctagctcatgtttgaacacgaaaacagaattgtccacaattttaggacagccatcgcatgacaacaaaccactacaatgataggagcatcactgagtcaacggagttcaagcagtgagcagatcagtactgaggccccaggagaaccaaggctctttggtacattttacagaacccagaaccgagccacataatctatggccaagtgatctttgacaaagttaacaaaaattaaccaacgtatacaccagggaaaggacaccccattcaataaagggtgctggggatattggatagctatatgcacgcgaatgaaactggacccccaccctcaacatgtaaataattaacacaaaatagattaaaggtttaaatgtaagtcttcaaactgtaaatgtattcaaataaaacaccaggacaactcttctggacaaaaagcaaacaatagacaaatgggacttaatgaatctaacaagtttcttcacagcaacagagtgaacagacaaagtgcagaatgatagaaaatatttgcacactgtgcatctgacagagtactaatatacagaattaacaagaaactcaaaccacaacaacaaaagaaaacaagaaccaaataaccccattaaaatgagcaaagaacatgagtagacatttttgcaaataacacataaaaatggacaatagatatataaaaatgctcagcattactaataatcagggaaatgcaaattaaaactagtgagatataccattcacaatggctgttattaaaaagtccaaaataacagatgttggagaggatgaaatgtaaagggaactcttagacactgttgatgagaatgtggacgagtacgacctctatagagaacagtatggattcagtatgatattgactgtgcatttgtcataaacagctcttattattttgagatacattccatcaatacatagtttaatgagagtttttagtattaaggggtgttgaattttattgaaggcctttgctgcatctattgagataatcatgtgttttttttccattggttctgtttatgtgatggattatgtttattgatttgcatatgttgaaccagccttgcatcccaggtatgaagccaacttgatcatggtggatttgaaaaccggcacaagacaaggatgtcctgtctcatcactcccattcaacatagtattggaagttctggccaaggaaatcaggcaagagaaataaataaagggtattcaaatagaaaaagaggaagtcaaactgtctctgtttgcagatgacatgattatatatttagaaaaccccatcatctcagccccaaatctccttaagctgataagcaacttcagcaaagtctaaggatacaaaatcaatgtggaaaaatcacaaacattcctatataccaataatagaaaaacagagagccaaatcatgactgaactctcattcacaattgctacaaagagaataaaatacctaggaatacaacttacaaaggatgtgaaggacctcttcaagagaactgcaaaccactgcccaaggaaataagagagggctcaaacaaatggaaaaacattccatgttcatggataggaagaatcaatatcgtgaaaatggccatactgcccaaagtaatttatagattcaatgctatccacatcaagctaccattgactttcttcacagaattagaaaaaaactactttaaatttcatatggaaccaaaaaagagcccatatagcctagacaatcctaaggaaaaagaacaaagctggaggcatcacgctacctgacttcaaactatactacaaggctacagtaaccaaaacagcatggtactggtaccaaaacagagatacagaccaatggaacacaacagaggtcccagaaataatgccacacatctacacccatctgacctttgaaaaacctgacagaaacaagcaatgtggaaaatgatcccctatttaataaatggtgttgagaaaactagctagccatattcagaaaactgaaactggatcccttccttacaccttatacaaaaattaactcatgatggattaaagacttaaacatgagacctaaaaccataaaaacccaagaagaaaacctaggcaataccattcagtacataggcatgggcaaggccttaatgactaaaacaccgaaagcaatggcaacaaaagtcaaaattgacaaatgggatctaagtaaactaaagacttctgcacagcaaaagaactatcatcagagtgaatgggcagcctacagaatgggagaaattgtttgcaatctatccatctgaccaagggccaatatctagaatcttccagggacttaaacaagcttacaataaaaaaaaaacaaccccatcaaaaattggcggaaggttatgaacatacacttctcaaaagaagatatttattcagccaacaaacataaaataaagttcaacagcattggtcgttcgagaaatgcaaatcaaaaccacaaagagataccacctcacaccagttagaatggcgatgattaaaaagtcaggaaacaaaagctgctggagaggatgtaaagaaataggaacgtttttacactgtggtcggtagtgtaaattacttcaaccattgtggaagacagtgtggtgattcttcaaggatatagaactagaaatgccatttgtcccagcaatcccattatttggtatatacccaaaggattataaatcattctgctataaagacacatgcacacatatttttattgcagcactgttgacaataacaaagacttggaaccaacccaaatgcccatcaaagatagactggataaagaaaatgtggcacatatacaccatggaatactatgcagccataaaaaggatgagttcatgtgctttgcatggacatgggtgaagctggaaaccatcattctcagcaaactatcacaagaacataaaaccaaacaccgcatgttctcactcataagtgggagttgaacaatgagaacacaaggacacagggaggggaacaaacatcacacaacagagcctgtcggggagtggggggctggaggggatagcattaggagaaatacctattgtagatgatgggttggtgggtgcagcaaaccactatggcctatgtatacctatgtgacaaacctgcacattctgcacatgtatcccagaacttaaagtatagttaacaaaaaagagagagagagagaaaggaaacagtatggagactttccaaaaaatgagaaacagtactggcctttattctaccaatcccactactgggtagctacccaaagagaaagaaatcatatttcaaaaagatacccacacttctatgtgtaccacaaatctattcccaatagcacatatgacaacctgagtgtccaccaacagatgattttataaaagaatatagcatatatgcacaatttaatactagtcagccacaataaggaatgaaactgtgtcttttgcagcaagatgcctagaactggcggacattataattagtgaactaactcacaaacagaaagccacatatcacacattattacttataagtgggaggaaaacagtgtgtacacaagatatggagagagggattatggacattggagacttagcagaatgggagggtaggagttggcagcatgatgaaaaatcacctaatgggtacaatgtacgttacttgggtgttggttacactaaagccaataccactgtgtaatatttccatgtaacacagttgcacccatagcccttaattttatacaaataaagataaaaccaattacaatttaaaatataaaattattaatagttgaccaaagatcttgaaaattaaaatttaaatcatgatcaataaatgaaattattatcagttgaactccatttaacttaaaatcctgtggtcctcaagtgatttcaagaaaatgaatgtcaagttttagatgaggagatttgcaaatcatatcaccacctatgtaattatagtaagaaccctcaaaactcaacagtgaataaaagaagaggcaacccattgataaaataggcaaaggtttgtgcaggcatttcattaaagaagatgtacagattacacataggcatataaacaggatctcaacaggatttttcatcacagaaattcaaatcaagaccacaataagatacccaaacaccctttttagaatggctgaaattaagaagaaagatggatcataccgatgctggtgagcataccaggtttctagagtctaaaacattgctaatgggaatgcacaatgaaacagctacacaggaaaataattcttagtttcttgtaaaattatatatgcccttaacacattacctaaaaatccccctcctgtaatacagtaatacatggctgtgtattactgtgaaagaggcatagtgtgaaaacccacatcttgaaaccctgagggagaaggcagctatactgtggctgaggagattacagggattatttgattaaagacttttttagaaagtgaggttaaatcagccgggcgtggtggttcacacctgcaatcccatcactttgggaggccgaggtgggtggatcacgaagtcaggaatttgagaccagtctgcccaacatggttaaactccatctctactaaaagtccaaaaaattagccgggtgtggcggtgtacacctgtaatcccagctactctgggcgctgagacaggagaatctcatgaatcggggaggctgaggttgcagtgagccgaaatcgacccactgcaccccagcttgggtgacagtgcaagactccgtctcaaaaaaacaacaacaacaacaaaaagaaagcgaggttaagtcattgaaaaataggaaaatataaatgtgtatgcactctaattatttgggaaattttccatacaacttgtattctgtaaacaaaattcagggagtggaaaacaaatcaaattaataaaactgatataagaattcctctgaagatattagtgtgagcactaacacacacttttgaatgggtgttgtaaatattttggaacacacctcttaggtcacattttaattctacatttatgtaaattatataaaatatcgaaattttttaatgtctccattttgtgcagttataattttggtttcatgccagcaatgcatgatagattccgttcttccacatcctcgttgccatttggcactataagcattgtgtattttaaccattctaatctattggtggtgatagctcattgttgtttaaatgcacatgtctctaaaattttatatttaattattttatataattgtgatgaagtgtttgttatggtatttggctcatttttgatagcattgtttatttttgatcagttgtaagtttctttacatacccattatataagtcacttaaaaaagtacttagctggtcatgaaccccaggatgagatgcagactgtatagaaatctctagcaatgttactcagtgtgggcagggatggcatgagatgcggggaataaagaataaagtaactttctccatttggatataagatgtgtccattcactagagagttttctttcagaaggttcccatgtgagccagtttccttcctgacaaggaaatcacccagaggattctcataatctcttaagtgagaaaagttttcctcaaactccagctcagtctagctcacactgtctctaaatgggcaattactttcagacatgtacacacatctgtcccaacgtggactcctccctcagacaagcacacacattgcaatgtggactctcccctcagaaaaccacacatgccccacaatgactccttcttcacataagcatatatgcctgatgctgaactgctgtgtagcaaaattagctcagaatacaagcacttatggactctagccataacaatgtgtagatctgcattttattttaaattctaaatgaacattttgccttcttgttaagaacagtggtttacagctctacatgtagagactacaggcagatatatgtttcctctgggaaaagtttattttcatgtatttactgggttattttgttgataaacattcatctataaagacacctgaaaagtgccctcattagagaaaaagaaagtgtagtttgcagattaactctgagcatccaatcccaggaatcctttgatctgccctccctgaaatccacaggcagaggggggatgatcgctgataagtagcaaacacatgtccacaggaagggagacatggaaatgtggtcactcccacactcaagaggagcagctcatcccctgtccgtagtggtcctggtgaggagccaccccacacctgtgccttcctcagtatccacaccatggggtctgtgctgatctgggcttcccttctcatcactctcaatattagtgtccttgcggatcaggctcagctgtggctgctccagatgaggctgttactcagtctgttccctctgtgtttgcagaagtcctgtgtgaagttcaccgggggagacagaggaaataacggtgcagccgggggctatctgagtctctcctccaaagactctggattcaccttcactgattgcagcataagcttggtccagcaagctccaggaccagggttgatgtgggcagcaacagggagaaattgaagaggaagctctcagtggtgccctccatgaatacaaagaatcttcacagtccccaggacacccttacgtgcatggtctcactgatatctttacttcttttatcacttttgttatgtaaatcacaatgaatagtgtattcctcatctattatacatttgttaagtcttttttggtgtctttaaaaaaactgataactttatagtatgtaatatccttaagtcctgaaagtgttttttgatgtctaccttgtcttaaatttatacagctactatagcttttcttggttcatgttttctcatatttatcttttctatttgtgaatatgtagagaaactttcttgtacatagctaatagttgtgtattgcttttttattttggcaggccttaaatattctaattttttatgatactttaagttttagggtacatgtgcacaacatgcaggtttaaacaaacaacctcatcaaaaagtgggcaaaggatatgaacagacacttctcaaaagaagacatttatgcagccaaaaaacacatgaagaaatgctcatcatcattggccatcagagaaatgcaaatcaaaaccacaatgagatatcatctcacaacagttagaatgacgatcattaaaaagtcaggaaacaacaggtgctggagaggatgtggagaaataagaacacttttacactgttggtgggactgtaaactagttcaaccattgcggaagtcagtgtggcgattcctcaggtatctagaactagaaataccatttgacccagccatcccattactgggtatatacccaaaggattataaatcatgctgctataaagacacatgcacacgtatgtttatagcagcactattcacaatagcaaagacttggaaccaacctaaatgtccagcaacgatagactggattaagaaaatttggcacatatacaccatggaatactatgcagctataaaaaatgatgagttcctgtcctttgtagggacatggatgaaactatctattgcttttttaaatcaactataataaattctattttttttttttgagaaggagtctcgctctgtcgcccaggctggagtgcagtggtgcgatcagggctcactgcaagctctgcctcctgggtttatgccattctgctgcctcagcctcccgagtagctgggactgcaggcacccaccaccacgcctggctagttttttgtatttttagtagagatggggtttcaccgcgcttagtgaggatgctctcaatctcctgaccttgtgatccacctgcctcagcctcccaaagtgctgggattacaggcatgagcaataaattctatttttaaaccaacaatatttttttccgttaatttttgtttaaattaacatttagtaatgatgcttatttctctattaacatggtatttaattaccttcctataaatattgtatagttaccataagatttacaataaaaattgtgtgtaattagattctaatgtaaatcctgtgatggccttgatatgaagaacacagatagtgtaactgtgtgctttgaattcctccttctcgccactctttcttgtttattctgtttgcacttacatatgctgtaaaatagaatatgtaatttattattactttatacagtcatatcttatagcaattacaaatgttaaagagtacaattcatctagattttcccatttttacaatctttatttcttcgtagagatttctatttgagtgcatatcacatggctactcgcagagaatctttgtaaaatgtgccctgaaacatgaatgtgctgacaacacatattctccagatctttttttctgacagaattttatttgccattcacctttaatgaaattttaatgcatgtagaatttcagtttgcatttcacctgtaatttattttcttgtaattattattagtttttcctggagatgatcacacattacattctgctgggcctttattaaccatgtttctgcgaacctagtcaggcttgggtttcaagtgtatggttgccgtggctatcagagttgaaatcagcttctcctgttcacaaaaacttcaggttcctctggtgatacctgcgtttgtgtccctgtttggctttggatcttcacatttcattctccccaaagaaaggctgtctctttcagctgtggcaggtgcatcctgctgacacatttacttggtgactttttgtgggatgaaggggcttggacacaggggcacgttttccaaccttctggctgagcctccttcttagctatgggtggtgagactggctctgatgcatgatcttccaagtgttcctgttccttcccttcctcagtgtcacagtgtctcttcccagtcatgctgttttttcatcagtgtcctcagcttctgacccactgtccttaccccacagattctggatttcattcctcaggaaacagacgggaggtgattctgggtagagtttccctgatgtcctctgtttccttgtgttctagttgattctaccagtgcccacaggacacaagatttaataaatgtctcctgcatataatgaagggggattcagcattgaacggagctactgttcttcctccccagtcaacaccacaggacagcaggtgggtgagttgtctggggatttccccaattctgtaggaaaagcctgcaagtgccaggagtttcacactctcacaccattagcacacacgtcttcaagcaactcattaaacatttccaggttagctttttcctatcttcaataccatgccatgagtggcacctgccccaggtactctaataaacgcaccctagttctctctgcgggcccctattttctcatatttcagggatttttttctctgtgacatcaactcagatatggtgaggggtttattttttgtaattcttcatgttttttgttaacgaggtcagaataatatcattttctcaatttttacattctaacgcttagtatctgatttctaaataaaattcagaaactaagacaacaaatgaagtatccattatttggtgcattgttaaacaatttgagaaatattcatgtactgaaatagaatgaaccactgaaatcaaggcatgcctcattcacataagaacatgagggcattatcaaataattttgctgagtggaggaagctaaagaattcaccatcaatttcatgtgatttcatttgtataaatcacagaagatgcaatattctaaattaacatagagaagatctgaatttctctgaaaatagggtgggcagagtaacaacgtggtgaaataaaattatagacaagttagataaaaaaattagaggttaacttaattgctaaaacatgattgaagtgctgattcaatgactgcacacatatatcaacattttccaaatgcttcactatcaatttgatttcattattgattgtttttttaataaagcagtaataaaaatgaatatattggctgagaaagagcaagaaatggataaataccgacacttgaataatcaaggactcctgaaaatacacacatgtgaacactgattgtagatttcaggtaaacactagaaaaggcaaaattacacaaagttgttatgacaggagggacatcctgaaaacctctctaggcatgtcccacaccaccctggagctgtctcaggggagcagtctcctccagtgtttagaggcacaggcacgcataatagggctaactctggccagatgtgtgatattggacacattgcacaactgctctgttctgtatgtaatttatcttctctacaaatgtaacattgacagttgcattaaatatattctgcaaatatgtaaaagttaaataagctgatgtctgctaaatgattaccaaggcacaatcacataatctgaagttatattttccagagtgataggattacctccagagttttccaggacactctcatctgctccgggcactgccttctcctcagccgtcccacccctgagcttgctatatagtaggagacatggaaatagggcccactctctgctgataaaaaccagcccaaccccgaccctgcagctctgggagaggagcccagcccccgaattcccaggtgttttcatctggtgatcagcaccgaacacagaggactcaccatggagtttgtgctgagctgggttttccttgttgctattttaaaacgtgatctatagagaactagagatattgagtatgaatggatatgagtgagaaacagtggatacgtgtggcagtttctgaccggggtgtctctgtgtttgcaggtatccagtgtgagatgcagctggtggagtctgggggaggcttggcaaagcctgcgtggtccccgagactctcctgtgcagcctctcaattcaccttcagtagctactacatgaactgtgtccgccaggctccagggaatgggctggagttggtttgacaagttaatcctaatgggggtagcacatacctcatagactccggtaaggaccgattcaatacctccagagataacgccaagaacacacttcatctgcaaatgaacagcctgaaaaccgaggacacggccctctattagtgtaccagagacacagtgaggggaggtcagtgtgagcccagacacaaacctccctgcagggccatgcgggtggtttcctttctcagctgcaggaggcgggcttattgttgcaggactctggagacttattaggttgtgatattttactatggttatttatcatgaacttttttattgggaattgtgttttattaatttttattttatatgtaaggttatttttttaaaatacataccttcaagaaataattcttcctaataatttgcacttgttctttttagagttttgttaacatctgttgatatcagctactacatagctatagggacattaatttacatctatagacatatgtgtaaatacacaaacttatacatatatgtggtcttttatatttaatgttataataaaattattataacaattataaaatacatcctaaagaatgaaacatatatagtaatccatattcctttcaatcattgcctatagtttacataaattgatgtctatttgtaaccttaaacatagtgtattggtcattttcaaacatccaagaacaaatttcaaatgtccttgtcacacacacaaaaataaaaatttgaggatttgaggtgatatatatgtcaatcagctcgattcaattattccatattgcattcataaatcataacatagctttattcactataaatacatacaaccaaaatttctcaattttcaatgaaattttaattatacatattttatctgtcctaggtcatgaatgtttttctccctgtccggatgtgattagattgtcctgagaaacaaattcagcttcctgcctcctgaaggcttcaggaagcagctcctagatggggtgaagcaggcaacccgtgtgtgtccacaggacccggagcctctctctccttggattaggccccctcctcaggattacagggctcttcagttttctcaacatgctgttataccagagaagcacaaaacacttaatttcattatatttttcttcaatttttcaaaacaacacaaaggtaataattttaacaataaacatattacaacctactatacatgagacccttcctgtgcttcgaggtttcttctcaggactttgtatgtattacatgttttcagtttttttctgagatggaatgttgacgtctccttattacagattattcttttaatttgtctcttagaataattttttccagagctcctgcccgcccgcgcctggcggaatggagcggcgccagggctgagccaggcgcgcaggggccgccgcacgtgccgcgcggggagcggatgcccagcgggcggagagccagcgccagaggccgggtcggagcggccgctggagcagcgtcagaatgggagaacagcccatcttcaccccccgagcgcgggtcttccagattgaccccaacaccaagaagaactggatgcctgcgagcaacaggcggtcaccatttcctgtttctatgatgtcacaaggaacagctatgggatcatcagtgtggacagcgccaaggtgaccataaacaacacaattacacagaatatgaccttcaccaacacgtcacagacgtctgggcagtgggccgacagcagagccaacacggtgtttggtttggggttttcctctgagcagcagctgacaaagtttgcagagaaattccaggaggtggaagaagcggccaagacagccaaagacaagacccaggagaacatggagccctcgagtaatcatcctgagaatcagggcgtggagccccatcttctactccggcatccagtgtcaacgggacggacgatgaaaggcctctcaggccgctgcagccgacacgcacctgcagtctgggaaccacaagctgaaggcggcctcgacgcagagctgcccacgggaagaggtgggagatggagctgcagacccggcgggagaccgacttccggctgcccacggcgctgcaggagtcgacggccagtgcggagcagaggaagaggccgtgagtcagagtgcgactgtgtctctgagaagatggaggcggcagagagaggatcaaaacctggaagataaagtgcgttccctaaagataggccctgaggagagcaaatcccgacagcgccacctggaggcgcttcctggtggcgctggaccggaagatccaggcctgcataacttccgcccaggcctcccaggctgggcaccaacaactagggctggcagaggcccgggatccccaacgtgagtcctaagtatgtgtgcgagaccagatggcgctaggacgttccctgtgtgcgttgcttctgtaaatgcaggcgccgtgtgtcgtgtttccaaaccagttgtgccatccactcactcctttccagaatagaaatctctcgcttctctggccttgtgaggttgtggacaactggaagattctgactgaggaaaccagaaccaggtctaccttcaacatttacgcagtcaggccagggatgtttatatcgttcataagggttgttggaaccatatgaactgaaaaaaagcattttctcatccaaatattgatattctttacaccaggccatcgggctccttttatccgatagcattcagagtatttgaaggtcctccaggtgccagccttgggggcacagggagaacaacattcctctccgaaaacatggggaagctttaaaataactgtttagtggagacttgcccagagatggaaaacaggtttctggtgagtacattttctggtttgggaatcacctgcatccccgatcctgccccgtgccccccagtttgtatggttgtgacaatgttccatttctttgttttaatttctgagcagttgactgtggtgcgggaacagcacacagtgagggtgcctagcacaatgcctggcgcaaagtaggtgctttataaatatttgttcaattaaaaaaaaagagggaggctgaggcaggagaatcacttggaagctgggaggcggaggttgtggtgagccgagatggcgccacttcactccagcctggcaacagagcaagactccatttcaaaagaataaaataaaataaataaaataaataaataaaataaaaaatattttttccaagccccactcaaaaccatggtattgttagaggtgtaatagttggaccaacattgaaaatacattccatttagttcatgggcgtgcaaatatccttttttctttaaaaattgttctcagttgtaatattacaaaaaatattggtaatttataccaatgacacaggttaaaatgttgtataaataatttaatgacgtttgattggaaaaaatacatgtgccacatgtcgacaattttttccttctctatgaaatatatactcattaataagtttcagatgttacagttatctttttgatttctgggatttaattttagtaggtatacttgaatgcattttattaattcctataatgatgttgatatttcatgtaggattttaatactaattttactatttactgaattttaaactattctacatgttttatttatataagaaaaaaattacatatgagaaaaaatgcgtagacctgaaatgtatcactagagagtttctgtcaaatgtgaatacctttgttcccaacacctaaggtagcctgaagagcaagtccttccccacaacatgcgtctttttctgtgcttgcggtcagctcctgcatggggaaatgttttgatttctgacactatagatccattttttttctgttttgaactttatataaatgcaatcaaacattttagaccttaatttggtaatgggctacattgctattttttgaggttatttcctgctatttaaggtattaaattagatcaacatattatcatttattcaagtaatggactgactctgatatgaaacctcaaagttttcacatatatatggagagagagagagagagagagagatgagggagagaggttttatatctgagtcagtctgttaaataagtaaatgacagtattttgatttattttcctgtaaatcgactttaaatttgtttccagtttatgaatattataaacaaagctgttacaaatgtcttagtgtaagttttcctatgttgtcttccttttattgagaaaatatgaagtatgtatttattataagcttaaattttttcagttttattgaggtataattgaaatattttaataatgtatagctttaaggtgccccacttgacgttttgatgttgtattagtccattctcacggtgctataaaaaatgcctgagactgagggatttgagaaaaaaagtgtgtttaattggctcacggttctgcaggctgtacaggaagtgtagtggcttctccttctggggagagtcaggaaagttaggatcatggcagaagacaaaggggagcaggtgcgtcacatggccagaccaggagccacaggaagcagggaaggtctacacactgttaggcaactagatcttatgagaactcacacactgtcatgagaacagcaccaggagtttgttctaaaccattcatgaaagacccaccccatgtcccagtcatctcccaccaggtcccaccttcacaattgaggattataatacaacatgagatttggggcaggacacagatccaaaccacatcagatacacattgtgaaatgctcatcatggccaaggtaatttgtatatccattttctcatggagctaccattttatttttttaaaatgtactacatgtgtgtgtatgtgtgtgtgtctcatgagaacacctacgatctacccgttcagcaaaaatcacatttacaatacagcattaaatacaagaacattgcagtacattagatctgcagaactcattcaccctgcacaactggacctctacccttcgaccgacatcatctgatttccctctcctcacaggcctgggacccactattctactctctgctttcaagagcttgaatattttagatcccacatgtaaatgagatcattaagtctttctgcatctggcttattccactaagcatcatgtcctctagccccatccctgttgttgcaaatgtcagaatttccttcttttcaaagcctaataaaattcagttttctgtgtacacattttctttacacattcatcaatctgtggtcattaaattattttacaaatctacactattataaataatcttgcagtgaacatgtgtttgacataataattttatttcttttgaatatatgacaagaagtgggatcaccagagcatatgatagctttatttttcaatataatgaataaccaaacctaccacaccatgcttttgaagtcttagtcatattttatttgcctaggccaatgtcccgaaaaatttctcctacattttcttcagtttgtacatttaaatattgaatccatattcaattaatttttgtctatggtgaaaaactagaagtctagttttattcttctatgtgtggctgtctaagtttttcagcaccacttactgaatagagggttgtttctccattgcatatttttgtcagttttgtcaaagaacaggtggttgtagaaacttgtctttatttcttggctgtctattcttttacattattattattgttattgtttttagtagcagtaccatgctgtctttcttactgtatctgtgtagtataatttgaaatcagggaatgtggtgctttcagctttggtctttttccttgggatttcttttgctattcaggctgttttttgattccatatatatttaaggattttttttaaaacatgtaatcaattatattggttacttgataaaaattgcattgaatatgtatcttgctttggacagtgtattagtctactgtgcattgctataaattaatgcctgaggccaagtgatttacaaagaaaagaggcttatttggcttacagttttggaggctgtgtgagaagcatggcaccagcatctgcttcttgtgagggcctcaggaagcttacggtcatggtggaagacaaaggggaagcagacggtgtcctgtggtgagagggggcacagaagaggggaggagggtcgctagactgtttttaacaatcagatttcaaattagctaataaagaaataattcactaattaccatgggggtgataccaagccatacctgaaggatcttttccccacaatccaaaaactcctactaggacccacctcaaatattttggatcacatttcaccatgagatttggaagggacaatcacctaaactgtagcatttcactcttgtgtcccctggtctcaaatccttgtaagattgcaaaatcatctttttttaaaatagttcccaaaagtgttaacttgatcaacctccaactgaaaattacaaagtctcgccagggtcttaaggcaatttccctccagctgcgtgctggcaaaatgttttaaagagttatgtacttccaaggtgcaatattgccattgggtaaatattgtcaatacaaaaggaataaattggccaaaggccccacacacacctaaagcctagcaggacagatattaaatcttaaagctacaaaataatctatcttgactttatgttcttagtcagggtacaccaggacaaagtgggtcccaaaatcctcaggcatctcatccttatggctgggcacattccatggggctaataacacaggccagagtcaagtgccagaagtagttccaggttgggagtacaagctgcctttggatctaccattctgggatcttgagggttgtggctgcatttctgtagctccactatgaagtgccctagtggggactctgaatggggttccaaccccatctttccccatctttggtactgccttcgtagaggttgtttgtggtggatccagtcctgtagcaagcttcctcctgggcacatagggttctctacacatcttctgaaatctaggtagaaactgcccagcctccttcactcttgcattctgcatatctgccagaatccagttatcccagcaccatttactgaacacagaggtttttttccacattgtttgtttttgtcagccttatgaagtatcagacggtttaagtgtgcagctttatttctgtttcctattttgttccatttcttctgcatatctgctcttgtaccagtaccaagctgtttttgttaccatgtcattatggtgtagcttaaagttgggtatcatgatgcctctggcgttgttctttttgcttagcattgctttggctattcagggtcttttttggttccatacaaattttagaatagattattttttctaattctgtgatcaatgatgttgatagttttatgtaaatagtactgaatctgtaaattgctttagacagtatgataatttttacaatattccttcttctaatccataagcatgaaatgttttcccatttatttgtgtcatgtatgatttatttatttatttatgctgtgttttgtagttctccttgtagagatctttcaccttgtttgttacctgtatttccaggcatttcatttgtgtgtgtgtgaatattgtaagtgggataagactgtgttcttgatttcactctcagcttggacatagttgggtatagaaatgttagtgattcttgtacattaagtttgtatcctgagactctaccaaagttgtttatctattttagaattattttggcagagtctttagaattttctatgtgtagaattatatcatcagtttggacagatatatctacttcttttcccatttagatgttgtattagtctatttgcacactataaagaaacacctgagactgcataatttataaagatttttaattgtctcatggttctgcaggctgtacaggaagcatggctggggaggcctcaggaacccaacagtcatgacagaaagggaagcatcatgtcttacatggctggagcacgaaaagagaggaggtaggtgccaagtacttggaaaccacatctcctgagggctctgtcatgggaacagcacaaaagagggtgaagcatccccatgatctaatcatccctcaccagtccccacctccaacactgggaataacaatttgacatgaaatttgggtggggatgcaaatacaaaccatatcagctccgttttattttttctattgcctggttgctctgactacgatttccagtagtatgctcaataggagtggtgagagagggcatccttgtcttatttcagttctcaaggggtttgagcttttgctcactcagtataatgttgagtgtggttttgtcatagatggctgttattatattgagtttttttttttttttttgagacggagtctcgctctgtcgcctaggctggagtccaatggcacgatctcggctcactgcgacctctgcctttcggggtcaagcgattctcctgcctcagcctcccatgtagctaggattatggttacgggcatgcgccatcacgcccagctaattttttgtatttttagtagagacagggtttcactgcgttagccaggatggtctccatctcctgacctcgtgatccgcccgcctcagcctcccaaagtgctgggattagaggcgtgagcccccgcaccaggctattttgaggtattttttgatgcctagtcttttgagagtttttatgagtgaatgttggatctcatcaaaagctttctcagcatgtattgagaaaatcatatgttttttgcttttattttgcttacatggtgaatcacagttactgaattgtggatgttgaatgaaacttgccttccaggggtaaagcctacttgatcatgacgtatcacattttaaagtgcttctggattctatttgttagtattttgttgagaaattttaggtctatgttcaccaagaatattcatctgatgttttcttttttaattatgtatcttcctgattttgtatcccaaggacacacaatgaaggaaggacagtctcccaacaaatgatgtaaaaactggacatccatatgcaaaataaataaaattagaccttctctaacaccatatacaaaaatcaacaaaaataaacataacatgaaaccataaactcatagacaacatggaaaaataattcatgtcattgattcagaaatgatttatttgaagttaatcccaaaagcaagcccagcaaaaaactacatgcaattatatatctgacaagaagttctatcaaaatgtataaataatccatacaactcaatagcaaatatcaaatgacctcataaaaagagcaaaaacctgaatagattttttcagaagacacatgcatgaaaaacagagcataaaaatgtcctcaagatgactaattgtcagaggaattcgaatcaaaagcacaatgacatatcacctcacaccacttaaaatggctattatcagcaagacaaaagataagaaatgttggcaagaatgatccacagccataaagagagctttgattggccaagagactgatttcagtaactttctcctgtgaagagaccactgaccatggacttgtcctggccaatttccagaggctgtgcactgtgtgtctttctgcccctgcacaaagcccttttgatatgcaggacccaactgtaattcatttagttcttaagtcctcaccccaaagcaaagctgaaatgcatgtatcatgtgtgtttgcttattagacatgagagcctccactccatgtgaatatccatagctccttctatagcctgctgagtgtgtacactcgaccaatccatttgcacaaatttgtttctcatctttccctctcttaaagtgcctgctcacagtctctgtgggaggctttccttcccagcctgttaagatggccatcctgcagcttcaaccctttctgagaaataaagtctcctttctaaatttataaactgggtgattcttccgttgaaagcacaagctgttgggaagagttatatggcaattccataaatgcctggaagacaagtgtggatagggtagggtaagaagtcctgggggctgcacaccccactctgatggaatttccctccagaaacttctgggttctcaagatgagaatccaaacagattccctcatggctctgtcatcaggagaactatactctgataagtatgcccagaacttcctccagacagaccctatagggaaaaaatacttttcaagatctttattctgtgaggggaagggattcttttccatcccagacagcttcatcttagccttcctgagtcatgaaaaggagtataattaataaaacatctggggtcagattcaagaaaataatctgtggatgctgcagccaggagggggagtggaggacggaggaaaatcagctgtaccactgaatactccttgtaaatggtacagcctagagaaagaatagcaagaaatcattggaattcaatttccagaacatatactgctcccctacccaccacatcacctcaccaccaatatgattatctggattaaagagaaaagtgtggaaaggcacagactccatctaaggactagaatttagggaaaccaaaggcagtgggagagaaaaagtcaaggacagtaaagtgacttaaaacctcttagaccaacagcttcaggaacaaggtcacatcctctccctcactgaaattagatttacctctcatggggcatctgcagggtgcgcaggtgagaactggcaaagagaacatgaaggcactttccaaatctccattagtacctagctcgctttagctgtttggaaaaagcaaaaccacaacaaacataaccaggactaggatcagtgttggaagcacttttcactggcaagacactaagaaggagggcaaattcgaggccagttactatgcaaatatgccactgtgagtgtgtgtggtggtgagctttgagacatagggtctgtgggtaaagttataatcgataaaatcttcaaccacagaatcctaaaaaaaagagccttccccaaagtcccatcagttcctggactcgccatgtgtctggaccgtatcagtggatccggagctccagggaaggggctccctgatggcttttatgattccttgcttgccgtgctgaggtctccctgtagattatgttgggttttctaaggcctattttctattgtaagaggtggtgggggaaacaatttctgtcactgaaagagcattctgagccagggcacagccccttcctactgagcttgagattctgggaggaaaaagttctctgacaggaggaaaaagttcccagacaggaacttccctgcagggcaggagctgagcggcagggggcgctcagggagcacccagcacaggacccagccctggggcaggtgcacaggaggctggggcagggttttctctcaggaattgaatgttccttatttcaaagcaataatgacctaacatttaaataagaatttagcaagtactgatgtgcctgtaagtattttattgtatacgcagcctatacctaacccaataatttaatgcaaaccggatttaaaaggagaaatgtctaggtctttcaaatgtatttctagttaggaattgaggggtggttttattaattcaatgggtgttactgtccggagacacactcatcccagaagttagatgtgcagagggcaaggctcaggaaaagttcaggtagacagtgagccatatgaacagggaatcacattgaggaccatgtcctgtgagattctgggtttctgtgagaggagttctgtcttcatggacttctgggcatgtcagaggacaaatattaaacaaagttcagggcagggagctcagcatcccactgtggcgtggtccacatgtcacctatcttcttcctcagggtggcgtggcctgagctatgaaaaacctgcctcatgaatatgcaaatgcactgctgtctaccgaggtaaatacagatctttccttgcccagagaccatcacacaacagccacatccctcccctacagaagcccccagagcgcagcacctcaccatggactgcacctggaggatcctcttcttggtggcagcagctacaggcaagagaatcctgagttccagggctgatgaggggactgggtccagttaagtggtgtctcatccactcctctgtcctctccacaggcacccacgcccaggtccagctggtacagtctggggctgaggtgaagaagcctggggcctcagtgaaggtctcctgcaaggtttccggatacaccctcactgaattatccatgcactgggtgcgacaggctcctggaaaagggcttgagtggatgggaggttttgatcctgaagatggtgaaacaatctacgcacagaagttccagggcagagtcaccatgaccgaggacacatctacagacacagcctacatggagctgagcagcctgagatctgaggacacggccgtgtattactgtgcaacagacacagtgtgaaaacccacatcctgagagcgtcagaaaccctgaggaatgaggcagctgtgctgaggctgaggagatgacaggatttatgaagtttaaatctgtttagaaaatgggttgagtaattgagtaaaacagcaatggaaagatgtgtacactgtcattatgtaggaaatagtattttcaactgtcaccctataagtaacactcacagagtgggaaaggcagccatcaatcaagctgatgcaaacattcccatgggggctttgtggggacatacattttataattggatcctataaatcattagaaacaggattgcttgatctcatggtaagactaaatataatttccaagaagtggccgaaatttcttccaaaatgtctttgcccttccttttacattgaatttattttaaaggagttttaggatcacaacaagtttgagtagaagaaacagagttcccatgcactcctgccccccgacgctcagccttctctgctatcaacaccctgcaccagtgtcataaatcggttacagaggatgaatctccacagacacattggttgtttccttttctggtggtccctggtataacaagcctcaactatcttgaagcaccccaggttcaagtggattcttcaagtgggttactgggaatgatgccaggtagaaggaaagtgggtgggaccattcctctttgcactctttcctcaaggatccataaaatgtacatttacatggagctcctctttctcctggttttatatgcctcttccccaatggtaaggtttcccagtgtttacagcgggggtccccagtccccgtgctgtggatccgttaaggtgtgcagtgcgttaggaactgggccacacagctggagatgagtgggggcgagccagcatcgctgcctgagctctgtctcctgtcggatcagctgtgcattagattctcctacgagccgaattcactttttttatatatatactttaattctagggtacatgtgcataacgtacaggtttgttacataggtatacatgtgctatgttggtttgctgcattcatcgaattctattgtgacctgcacatacaaggggcctagactgagcgctccctatgagaatctaatgcctgacgattgcagggggaacaagttcatcccaaaaccacccaccgccatcatccatggaaaaattctcttctaccaaactgttccctggtgccaaaatggttggggacactggtgtagaggcaggtctgtaccttggaaagccagcagcttctggtgaatcccataattaatgtcctttaatgagaagtggagactttggtcatgagggccttcgtgaataatgccctacagttggattcaaaacattgtaagctcttggggggtgtttctggataaagccctttgtgcagaaaatgcagacacatccatgggatccatgcaggaaaaaagcttcctttacaaagtggtttggcacctggaaggagctctcagggttgggcactgtaccctttgctggctgcactttagccagaggcttaagcctgattggtcttgcagtgggagagccttcctggggtcaaaggttacaaaaatgcctgtcatcttccagctgagcaagcccatctgcgtgcttgtcagtgtcaaccccatgaagggtgcactctggaagatgacaagatgcacacaaacctcctcccactgattatccactaccacacactcagctgcaacccgtgctccagaaacggacaggggcctgcaaggataaacagaatggaagtattttattacctgggaaagcactgccaaatgccacgtttcaggaaggttaactcataagtgttcaggaagtgactgaagggcagtggtgggtgaggtgacgggactgcctcagggctgcacatgaggagggctccctcccacacagccttttcctccaggagctgcaccaggaactcacagaggatcaggaaggattctgagaacattcttctgtggcgctgactagaggggcaaaataaattataaaaaataaatcaattctaaatataatatgatgtttgttattagaaactatttctggatcctgtgggaaccctgacataagccaccattctctgtgaacaaacatttaacctctccttccatggggaggtcgacgagcttggattggttctttcatggatagtatcccccaaactcctctccactccctgcgtatccccgggtctctcagtgacaagttctcctcagtggaatttggttgatgtagtgagatcttcaaatttcctgtcgtctgtgttctcatgttctccccttatctgagattaagaaacgcacctgcatgtagtaaattatagcctactgtctctcatggacaaaataatggccacgccaaccaaccttgtggctgacagcaaccactggcggccaccatcccctccacagcctgtgttggaacatcacctgagagattgtgttagcaactttccttcagaatcatcttaaaaactttgtgtcccatttcacatggagacgtcatttttccatttcatcttcatagagaaatagaaggagaagaataccaaatacacttcctatctccagattattcaaatataattgtccctttatcaccttctgatttctggtcttcacagaatactctacaaatttttctcactggcgttataccaaaagttgtgaagcaccagatactgggattaatttaaccaacattattattctaataattcttagaatttagaattacaattatcatcttttcgtatacggataaactaacctatgcctttgaaaataagcccttacatgagagtgaaaagctatagatttggaggatttccttgcaaatccaatatttggaaaacggattttatcacaaatatacaaattaacttacaattgaacaacaaaaccacagaatttaattttaaaatgggcagagacctgaatagaaaccatatccaaaaaacaaacataaaaagtgatcaacttgattttcattaggtgtacttatgtttaatatttaaaaagttctactaaactatgagaatgggtaaaaattacaaggtagacaatatcagatggtgatgaggaagttgaaaaacaggaactttcaccccttgctggtgggaatgccgaaatggcacatagaaaactacagttaataatttattgtatatttcagaatagctacaagataagatttggaatgttcataacactaagaaataatcagtgatatagatgaaggatatcctagttatccagatttgatcactgcacataaaatgcttttatcaaaatatcagttgtaccacctaaatattttgaaatattgtgtatctatataaatcaaacattaaaaaacaccaatgcagtggaatccagctaattgcagattcccattagatgggatgtgctgcatgatctgtaaactaatcagaatctgtgggtttgtaaaggactttagaaatcaactaggctgcttgtttctaaagataagtctccctagtttaaatattttcttaatgggtggcgattttgaacatagaagaaatagtaatatttgtgtcttgtaagttttcttcttctcgtgtcacgagaaaaggtttgcagggaggaatctgggaccatctttcaagtctcaacttcactgtgattacctcagtaagtattttctgatacccctgactaagataagtctcgtatctgtcctagaaactaaaagtagaattctaagcatctacctgaccagatggaccttcctcttcaccaaggagttccagagacacttttaaacctagctccggccgtgttagaaatagaggatcagaaatgcctcattataccctcctccctttggaattcaagcacaactaaccagcatttttatgaaaacagagcttaaggctcagaaaacagattatttgtagcagtaagataccaaattctaaccttattcgagaatatcatcacaggacagagagcaggcattgaaaggaatcaaaggcttttaccctaaaatatattcctttgacatattttaaaatagccaggcacagttatcttttgtgagagagatttacattctgtagagaatctccttccctttccaggtctttttcttataccgaggagattagctgagggtctagcttcttttaaaggtcttaggagaaaacatttcccagctattgcctctaaaggtggtcacataagagacttcatctacatagtaagaatcttgttctccaaaacctgttatcttaacctagaaacatttttctaccggtttcaggtctttagaaaaaagcttaaatctttcaatcaattgtcaatcagaaaatattcgaactcactgtaagttgtaatccccgccacacactgcctcacttctagctgttttgtctttatggaccaaatcaacatatatctcacatgtattgtttggtgactgtctctctagtacactaaatttaagctgccatcaagccactttgggcacatgttctcaagatcttctggggctgttcacagttcatggtcctcacattcgcctcagaataaatctctctaaatattttgcaaggttgctttttcatcagtagttctaacagaacctactctgtggtttttgttaaaagcattatattaatatagtattagtaatattagtattagttataacacatgttggaaaattcttatgaagttatgcatagactaacaatgggatcaagtgtaaatgtttcaaagtatttaagcaagttatttcaaaatttatcttctgcagatacttctatcagattcattatatcagctaattacttgctttatgatttttgcattttattgtagatgatcacaccctatattttcttggcctttattgtagaaaattgtgtgaaactagtcagggctacatttgcaagtaattgtcgcagtggctgcctgaattgcagtgggtttcctctgcagccaccagtcactcagattactccaatgacaccttaattttgtttcctgcttggctttgggccttagtcttgtgctctccagacagactctgtctttcatctcccctaggtcaggccagagccacatggacctgatgattgtcaatatggtgggaagggtcgcactgaacgggcactctctgtccttctgagggagccatactgcaggcagacatggcagtcctggctcagggtgtgtccttccaagtatccctgcccttccttcaggtgtgatgctgatccatgcatcttcctcccattcctgggtagagggtctccttgttctttccccaatcttctcccagcagccactatgtcttcccactgatgtcttcagcttcctcttttctgcccttcccagcagatgagtctgttattcctgagggaagagagaggaggtgggagatgaggctttattcctgaaagaatggacagagctttggagcttttctttcttctaccccagtttctacgagttcctccagtgcctgtaacacagagctgtcagtggctttgcccctgcatgttaattctttggtcatgtagtggtggtgagggagctgggtctggatgcatttcagccacagctgctgttccacttccccacacagaaccgtctcaggaggaagaggttggagatttttctgatgtgtcctcaatcctgggagaaaagttttcaatagcaataggaatctctcagttgtatgtccgctgagaatttaaacaataacttctttataatactaaattttaaacaatccaatgaatatatctaatttaattttttattagcttatgtgacatttgctggcctctcccccagataaggtcatattctcttcctgtttgttcctgcaagtcactgaatttcacaagatgtaaggtctcttgattatactataacatcaataatctggtgtactaaagaaaatgtgctaatttgcagcttactaaaattagttgttttagtaaaaataatatatttgttatagcatgcctacatctccaggctgagtagaagctttgtttgtaatactcagaaactgcaaataacacacatattaaggagctttctaaataaatactatgggtgaattctttaactggaatactgttcctcattagaatcaacacattctttatacacaaccaaattactgactcacaagtaattatactgagcaagaagccacacaaatgaaattgaaaatataagatttcactttaacaaaatcttgaaaaatagatctgaattaacaaagatgagaggttgactcagtatggtgagagggaaataatggggaggcaggaatgagaggaacacagggaggcttttaactgtaatcatcgttatctcgattgttattttggatacacaggtgagcacacgtgaaattacgttttttttccttcggagacatggttttgctttgtcgtccaggctggagctccgtggtgagatcatagctctctgcagcctcagaccctgggtctccagcaatcctcctccctctgccctatgtagctgggactacaggtgtgcaccaccatgctcggcttcagtgcgtattaaaccgcacacttcaattatgcagtatttattatatagcaataatgcctcaataagggtattacaaataagtggatagataatttgttaaagattgatggaaagatagataccaacatgagaaatgtatgacactcaagaaaataaaactgtaggaaacttgcttttctttatatttgttaggtaatcaccacagtgtgtacacatcacaccatgttcccattacagagaaaaggttctgcgaacctcacgagctgtgacccctgtgtgctgggcttggttcagggagaagtcaggtccagtggtgagaagcacaggcccagatgcccaggctcactctgaccaaaagtgagcactggggacattgtaaaacccacctgtgcttttgctgataatttttcatctttaacatggaaataatattgatactatataccatggtttctctgcgtatgtaaaaataaaagatgattggtgctaactttaaaaatatgcagtttatgtagatctatggtacctcaataaaactgttttaaaataaaaattacaaaattataagatttttaggttttaaggtttaagtttatcacaaaacaaactgacaataggaaagcacaatttcccaatgctttcaatatcacagatctccccgaggacattctgacatgctctgagccccactatctccaaaggcctctcaccccagagcttactatatagtaggagatatgcaaatagagccctccgtctgctgatgaaaaccagcccagccctgaccctgcagctctgagagaggagcccagccctgggattttcaggtgttttcatttggtgatcaggactgaacagagagaactcaccatggagtttgggctgagctggctttttcttgtggctattttaaaaggtaattcatggagaaatagaaaaattgagtgtgaatggataagagtgagagaaacagtggatacgtgtggcagtttctgaccagggtttctttttgtttgcaggtgtccagtgtgaggtgcagctgttggagtctgggggaggcttggtacagcctggggggtccctgagactctcctgtgcagcctctggattcacctttagcagctatgccatgagctgggtccgccaggctccagggaaggggctggagtgggtctcagctattagtggtagtggtggtagcacatactacgcagactccgtgaagggccggttcaccatctccagagacaattccaagaacacgctgtatctgcaaatgaacagcctgagagccgaggacacggccgtatattactgtgcgaaagacacagtgaggggaagtcattgtgagcccagacacaaacctccctgcaggaacgatgggggggaaatcagcggcagggggcgctcaggacccgctgatcagagtcatccgcagaggcaggtgcagatggaggctgtttcctgtcagggtgtgggacttcatcttcttctgacagtttctctagtgaacctctctaacctcagaattctgtgcttactaatgtcatctctacgtattttttaaaagatcattttaatatgagcacctattctcacacgcaccaaatgcagattgacgcttacagagatgaaaagttctcaaccatggtcaccaggatgagagtcctgaggaaattcaggggtgcctggtgactcttccgcaatcagtcctgggacagaaacctcagggacagcctttatgagttttgatcacatctaacagagaggatgggccagggccagagtcatgtagaacctcacaggttccacgtctgacccttctcctgacactaaagccaatcagcatcagcactgacctggtgctccttttgctcccaatccatgttctttctttggagagtttcttctcccttttttatttgcttttcctctttcctgaaaaagaaacagatggtccccttggtccacattccagggctcaaggcattttcttggagctcaggtggggctcaggctgtggctcctgcagccacgtgggagaggctgatgggacttccttctctccccattttctcaggaccctctactgtgttgtgtgtaggctcatctgggaatgcagttgaccattaatactgaaggggacaaactcatttgatcaaaatgggatgtggatgtggagttaaccctgttccgtgcacagtgtcagagtcgtctgcttcagaagtagtgttagaaagagctggtgaaatttatcagaatcaagatggagccacttgtgttaaagccctaatgaatgaagctggggaaggccatgaaggagggttctaacacacatattcctgataataagaactaccataaatagactctgcacaaccataaccttgcacagaagccaccacaacattaaaagaattacttctcccattgtatctgcccagcaactccctgttcaactttacaccgatgtgcccctgttattgatccttctagcccaggacaattgtcttaaacagctgatgtgaccctcctcatttttcctttattctttatcttcctataccaacctgaatgcacccatacatttcaattgcaatacacttcctagaatacatattattatattttagagtctctctctctctgttattcagggttgacaagctacagatggacatgccactttctttttttatgactttttttaaaaattttattattcttgtactttaagttttagggtacctgtgaacaatgcaggtgtgttacatatgtatacatgtgccatgttgttgtgctccacccattaactcgtcatttagcattaggtatacctcctaatgctctccctccccactacccccaccccacaacagtccctggagtgtgatgttcctcttcctgtgtccatgtgttctcattgttcaattcccacctatgagtgaggaaaaaaatgatgagttcatgtcctttgtagggacacggaagaaactggaaaccatccttctatcattctcagcaaactatcgcaaggacaaaagacatgccacttttctgtgagatgtggaggatgacagtttttggagatgtctgggaatacccagtgtccagaagatcatccatcaataagtgcaggctggaggtcccagagagaggcaaagctgctgaaacaccatggaatttcattttctccagttctgctctgatggaatcaggcccacctgttttgcttgtcttaagtaaattcacagcaccacatatattagtgttgcagtgaataactacaaagtctatcctaaccaagtgtaccatcaaatttaccattacccagagggaagaatctttaacatgagatctatgttcataattttttaaggtgaaaaagtgatcactatccaatcaggcaaatatgattttgctaatgagtggtagatgttgcatgtatttttggatgtcatccctttttcagatgcatggcttgcaattatattttcccattctgtaggttggaattatttccacactttgtagaatctttttgttgtgatgtagttccacctgtttaattctgcttttgttgtctgtgcctttaatgtgaaatataggaaatcattgttaatatattattttctgggtcggggaaattttacaattgcaggccatatgtttaaatatctggcccattcagagtgatttttgtgtttattctaacccaaaattcttaactctttgcatgtgtacatccagtttttctaacacattcatagggagagacttggtttatctgttttatattgtgggttcttatgctgaaaatcagtttgccattgatacatcagtttatttctgagctctttctacatatttatgccaactccatcctgtttttattattctacttttgttattacttttgaaatctggaagtaagatgtaagtttatttttgcctttttacagatgctatagcaaaatattttaacctttcactcttccatataaaagtatggctttaaataatgacttttattatatacaggttatattcttgtattcctaacttttagaggttttattatgagatcttgaattttttaaatgttattttctatgtctggtgagaagttaactgatgcttttcctttattctcttaatttaccacatcagatttattgatttgaagatattgattcatcagcgcatctcaaaaataatttggagcttgtcatggtgtacaatccttttaaagtcttatagaacttagttgactatgaattgggagtagcttgtttatatatactaagaacatttgtcagaagtttggttttcttcttttgccttgtctattactggtaatacagtgattggagcctcttagaaagagattagaaggtggggacctcacggattttttaaaaagttagagaacggttgtcatcacttttttaaacgctgagagtcatttgttatctaatatataacccatcatgaggaatatctctagtgtgcttgggaagcatgcatattacgctgctgttggttggaatgttccgtagatgtctgttagggcagtttgttcgagagtgcttgagtccacgggcttcctaagaatttttctgtggatgctctatacattattgaaggcgaggttttgaagtctcctaatttttttatagttttctatttctccttttatacatcttaaagtttcataaatgtagttatatttctagtttttcaaatatgtaaaagagaaataaaaatatttgcttagtaattttaatgagaaaatcacataacaagaaattatattttccaaatgctgccatcaacactaaactcctccaggagtctcacatctgccctgggctctgctctctcctcaggcatcccacctcagcatttgctgcagaggaggggacgtgaaaatagggccctccctttcctgatggaaaccatcgcagccctgagcctacagctctgggagaagagccccagtccagcattaccaggagttttgatttgacaatcagctctgaacacacatggctcaccatagagttagggctgagctgggttttcttgttgctattttaaaaggcaaataatggagaactagagatattaagcatgagtggatgtgagtgaaaatacagtgattatgtgtggcaggttcggaccaaaatgtccctatgtttgtaggtgtccagtgtgaggtgcaggtggtggagtgtaggggagagacaagagtcagaaaagtgtgcaggaggccgggtgaggctgtagacactgtcagcccactatgccaatcccaccacgagtgctggagaaggtgggagtctgatgaagcttactaacaaaccctgtggtccaagctattccatcaaggccattggttcttcccagagcatagctgtccatcgggaatctcccatgtgcccagcagcagccacgcgttagcaacttcactgtgcacagtcattgtttgggaggagctccaggatgtgtctctttgtcaaaaactgggtgatggtgtcagagagctgtgccgggtccctggtccacgtgctccctgacattggaggtataggaggtgcgttctcagggtggaaacaccttttatggaaatgtacataataaatcacgattttccttggttctcttagacgacatggagaagcaagcatgcaccctgcaaacaattgtaatttcctgctttaccccaagttcatgatttcttgtaaactttgatttctgtccaagtacagagatactgattagagtgagtttggttctttccacacactaaccctcacctcccccagatagagcacattgtcctcactctgagtctgagggaggagctgttcctgtacaactcagggcctgcagagacccccgtgtgcagctttgcagagtcagatctttcctcatgtgaggcgacctccactgcccgtgattgctgctcaggtctaattgtggattcgggattatgacaccctttgggctatcacaggtcaatcttattctgaaaatcaccgtaattatagacagaggtaataatccagtacccattcttctgtccgcagtttgtctttcttatttggttgaaagtttgaagaaaaaatgtgaccatatattcatctaattctaacctctgaatctgctatttgctctcggggacctacaaattgcaaaacagtgagttcttcattttcatcaaaatgtgcaaatttgtgaatttcaacatgttgttcagaacctgtgcatgccgacaactgtgattctcggtgcactcctggcctggtgaagccctcacagatcctccccctggcctgtggcatctctgcttctccattacaaccagtgcttcctgctggagctggatccgtcaccccccggggaagggactggagcgaatcaggtgcacaggtcatgagggagtgcacaatccaacccactcctcaagagtccagtcaccatctccagatccacatccaaaaaacagtttctcctacagctgagctaccttaacaaggagtacacaaccatgatttttatacaaaagacacagcgaggggaagccattgtgcgctcagaacactctacaaattttcctccctagtgttttaccaaaactggtatatatttcagatactgaaatatttacaacctacgttattatgctaagaattctaagttagaagttagaatgataattgtctcttttttttcctttttttttttttttttgatactgagtctcactgttgttgcctgggctggagttcaatggtgcaatctcggctcactgcaacctctgcatcccaggttgcagcaattctcctgcctcaaccccccaagtagttgagattacaggcgcctgccacgatgcccggctaatttctgtatttttaatagagacggggtttcaccatgttggcctggctggtctcaaactcctgacctcaggtgatccaaccgcctcagcctcccaaagtgctggaattacaggcaggagccactgcacctggccaattatcctcttttcatagatggataaactaacctaggcctttgaaaataaacccttatctgagagtgaaaagataagccatagatttggagagtttgcttgcaaatcaaatatttggaaaaggacttttattacaaatatacaaattaccttacaattgaacaacaaaaccacacaatttaattttaaaatgggcaaagacctgaatagaaagtgcatctaacaataagtataaaaagtgaccaactggattttcattaggtaaatgtatgtttaatattgaaaaaatcctagtaacctaatagaatgggtaaaatacacaatatagacaataccaaatgttgacgaggaagttgaaaaacaggaattttcacccattgctcctgagaatgctgaattggcacatagacaactacagttaataatttattgtgtatttcaaattagctagaagataacatttagaatgttcttaccacaaagaagtagtcaatgattgagatgaaggttgaaggttgtcccagttatccagatatgcacataattttctttttttcaaaatatcacatgtaccacataaaggttttgaactattatgcatctatttaaattacacattaaaaaacaccagtggaagggaatccagctaattgcagattgccattggatgggacgttctgtataatctgtaaactaatcagaatctgtgtttttctaaaggacattaggaatcgttatactagtttctaaagataagccttgcaagtttaattattttcctaatgggtggcgattttgaacattgaagaaatgttagtatttgtttctggttaagttttcttcttctagtctcaggagaaaaggtttgcagggaggaatctgagactatctttcaagtctcaacttcaatgtgattacctcagtaaatattttctgatacccctgagtagggtaagtctcatatatgtccaataaactaaaagtagaattttaagcgcccaagctgactgaatggaaccttcctcttcacaaggagttccagagacttgaaaacctagttcaggccacattagaaacagatcagaaatgcctcattataccctcctcactttgtaattcaagcacaactgaccagcattttcatgaaaacagaggactcaaggctcagaaaacggattccgtgtagcaataagataccaaattctaacctgactcgagaatagcgtcatgtgacacagagcaggccttgaaaggaatcgaaggcttttaccctaaaatatatttctttgacatatttttaaatcgccctgcacagttatcctttgtgagagagatttacattctgtagagaatctccttccctttccaggtctttcgttatactgaggagattagctggaagtctagcatctcttaaaggtcttagtagaaaaacatttgccatctatttcctctaagcgtggccacataagagacttcatctgcataatatgaattttgttctccaaaacctgttatcttaacccagacactttttactactgatttctggtctttagataaaaacttaagtctttcaatgaattgccaattgaaaaatcatttaattcacctgtaagcggtaattatctccccacactgcctcacttctagctgttttgtctttatgaaacaaatcaacagatatctcacatgtatcaattgatgttattaaatttaacctgcaatcaaaccactttgggcacatgttatcaggatcctctggggctgcgtcacagggcatctaccccacatttggctcagaataaatctctctaagtattttccaaagttggctttttatcgatagaatctactctgtggtctctgttacattcaaaagcatgatagtaataaagtattagttattaaaaataagcacatgttggcagtttcttacgaagttacgcatagactaactatgggatcaagtgtaaattttcaaagtatttatgcagttatttcaaaatgtatgttccacagatacttctatcagatcctttatattagataattatttgttttatgactttttttgtagatgatcatgccgtatcttttctaggcctttattgtagaaaattgtgtgaaaccagtcagggctacatttgaaattcattgtcacagtggctgcctgaattgcagtgggtttcctctgcagccaccagacacccagattcctccagtgacaccttaattttgtttcctgcttggcattgggccttaaattgtgtgttccagagagactctgtctttcatctcccccaggtcatcccagagccacatggacctgatgattgtcaatgtggtgggaagggttgcactgaacgggcactctctgtccttctgagggagccacactccaggcagacatggcagtcctggctcaggacgtgtccttccaagtatccctgcccctcctgcaggtgtgatgctgatccatgcatcttcctcccattcctgggtagagggtctccttgttctttccccaatcttctcccagcagccactatgtcttcccactgatgtcttcagcttcctcttttctgcccttcccagcagatgagtctgttattcctgagggaagagagaggaggtgggagatgaggctgttattcctgaaagaatggacagagctttggagcttttctttcttctaccccagtttctacgagttcctccagtgcctgtaacacagagctgtcagtggctttgcccctgcatgttaattctttggtcatgtagtggtggtgagggagctgggtctggatgcatttcagccacagctgctgttccgtttcccacacagaaccatctcgggaggaagagggtggagatttttgtgatgtgtcctcaatcttgggaggaaaggtttcaatagcaataggagtctctcagttttaagtcctgtggaaatttaaataataacttcttcattatacttaattttaagcaatcgggtaaatatatctaatttaatcttgcattaacttatatgacatttgctggcctctgcctcagataaaattatattcttttcctgtttatccttacaagtcactgatttgattttcacaagaggtaagttctctcatttgccctatacatcaataaactcatgtattaaataaaatgtgctaatttgtagctcagtaaggctagttgttgtaaaaataatacttttttattggatgactacatctccaggcggagtagaagatacatttgtaatactcagaaactggaaataacacaaatgttaaggagatttataaataaatgatagggttgtactcattaactggaatactgttcctcgttagaatcaacacctttatacacaatcaaattactgactcacaagtaattattctgagcaagaagccacacaaatgaaatggaaactaaaagatttcactttaacaaaatattgaaaaatagatctgaattaacaaagatgagaggttgactgagtatagtgagagagaaatgacgggaggcaggaatgagaggaacacagggaagcagggaagcttttaactgtaatcatcattatcttgattgttattttggatacacaggtgagcacatgtgaaattacattttttttctttggagacatggtcttgctttgtcatccaggctggagctcagtggtgagatcacagctctctgcagcctcagaccctgggtctccaatcctcctccctctgccctatgtagctgggactacagttggcaccaccatgctcggcttcagtgtgtattcaactgcacactttaattatgcaatatttattatatagcaataatgcctcaataagggtattgcaaataagtgaatatataatttgttagataaagactgatggaaagatagacacgaacatgagagatgtatgacacttaagaaaataaaactgtgggaaacatgctgttctttacaattgttaggtaatcacaaaagagcatacacatcacaccatgttcccattacagagaaatgcttctgtaaacctcactaggtgcaacccctgtgtgctgggcttggttcagggagaagtcaggtccagtggtgagaagcacaggcccagatgcccaggtcactctgaccaaatgtgagctctggggacactgtacaacccatctgtgcttctgctggtaatttctcatttgtaacatggaaataacattgatactacataccatggtttctctgcatgtgtaaaaataaaagattattggtgtgaacttcaaaaatatgcagtttatgtagatctattgtacctcaataaaacttttaaaataaaaattacaaaattataagatttataggttttaagggtttaccacagaacaaacttacaacaagtaaccacaattcccaaatgctatcaatatcacaaatctcccccaggacgctctcacatgctgtgagccccactctctcctcaggcctctcaccccagagcttactatatagtaggagacatgcaaatagagccctccctctgctgatgaaaaccagcccagccctgaccctgcagctctgggagaggagccccagccctgggattttcagatgttttcatttggtgatcaggactgaacacagaggactcaccatggagtcatggctgagctgggtttttcttgccgctattttaaaaggtaattcattgagaactattgaaattgagtgtgagcggataagagtgagagaaacagtggatacgtgtggcagtttctgaccagggtttctttttgtttgcaggtgtccagtgtgaggtgcagctggtggagtctgggggaggcttggtacagcctggggggtccctgagactctcctgtgcagcctctggattcaccttcagttactactacatgagcggggtccgccaggctcccgggaaggggctggaatgggtaggtttcattagaaacaaagctaatggtgggacaacagaatagaccacgtctgtgaaaggcagattcacaatctcaagagatgattccaaaagcatcacctatctgcaaatgaagagcctgaaaaccgaggacacggccgtgtattactgttccagagacacagtgaggggaggtcagtgtgagcccggacacaaacctccctgcaggggcgcgcggggccaccaggggggcgctagggacccactgagggcgggacaggagcaggtgccgggagaaggttttcctttctcctcagctggaaaagtcaggtttgtgtttgccggactctggagctttctaggctgtgacgttttattacttgtgtttattatgaatttattatcgttagtatttaaattttagtaatttaaaaattatatatatatgtttacactttaatgaaataagcattcctatttgcaccgattcttccagagttttattaacatttgttgacgtcagcagctacgaagctatagggacataaatttataaccatagaaagatgtataggccaggcgcggtggctcacgcatgtaatcccagcacgttggaagccataggtgggctgatcacttgaggccaggagttcgagaccagcctgggcaaaatagtgaaactccatctctactaaaaatgcaaaaatcagcttgtgcgtattggcatgtgcctttaatcccagctactcggtaggctgaagcaggagaatcacttgaacacggaaggcagagattgcagtgagctaaatggcgccactgcactccagcctgggtgacagagcaagattcgatctcaaaaaaaacaacaaaaaacaaaaacaaaacaaagaaagaaaaaatatataaatacaaagacatatgcatatatgtgtaggaattcataacaaacattacaataaagtaattctaaaaatatgtcctaaagaatcaaacttaatgatgagctaaatgtaaattatttgagtatttcacaattgattttggttatttttaattgtttccatcaattgatttatatttgttcatttaactactgttaaataatggttatttcaaatgttgtcacaataaataataagaatgtgaattgataaatgataattatcttaatcatttcttaattatcttagttatcccatatggtattcacaaatcataacattgcttcttaccttgtaaatataaacaaccataatgtgggaatttaaaataaaattttttattttaattttttaaaatttatcccagatcattatctttttcttcagctccagctctcatgtgatggtctcaagggcccatctgcacccctgtctcctgaaggcttctgggagtggctgtgggacagggaggaagcaggagcccatgtgagtccacacgacctggagcctccctctccttggattaggccatctcctcgggatcacagggctcttcattatcctcaccccgctggtggcccaaacaagcaacatcacacttcaattcatcacgcttgggtttaattttcttaatcatcgggaaggtgataatgttaacaggaaatgtttcactaacaaataggataagcccttttccatgggacagggtttcttacaaggacttgacatgtattatgtattttccatttctttatagatgagatactaatatctccatattggagacaattcctttaagtcatttcttaaaattaatttttcctaggactccaaacaaatccatgatatagttgaaaatttcaggtgtaagagctgggccaacattgagactatattaacatttataacatgtgcttgcaaatattgttatttttctgtcggctgtccccagttatggtttgatacaaaatgttagtaatttatcctaataaaacagtttacaatattatatcaatagtttattaactttgtataactaataatataaaatgttcaacatattttagccatattttacttatttgtgaaatgtgtgcttattagtttttcgttttaagatgtcacctttatcttttttatttctgggattttattctagtagatataactaaatgtctttaaataattattgtaataatcacatttatattttctatttgaattatcatatgcatgttattaagattttaatttcaataaaaatattttcctccaattgtctattttctgtttttatgagataacatatacaaaaatgcatagctcttcaatgtacagtttgagggtttctggcaaatgtgcacgtttgtctccagcacctaagttagggtgaggagcaggtccatctccacaagtgtcctctcagtgtttccagtcagctctcacataaggatttttttttaatttcaacttttaatttagatacagaggggacgtgtgtggacttgtcacacgggattattgagtgatgctgaggtttggaatccagattccatcaccccctccctccactctccagcagtccacggtgtcttttgttcttctatttatgtccatgtgtgctcaatgctgagctcccacataggagaatatgtggtattcggttttctgttcctgcatttatttgtttatgataaagaccaacagctccattaattttggggcaagggacatgatttcattctttttcatggctgtgtagtattatatagtgtagatgtaccatattttgtatattcagtctaccagtgatgtgcatctgggttaaactacgtctttgccactgtgactagcacagccatgaatacgcatgtgtaggtgtctctttggtagaattatttatttactttttagtgtataccctgtagtggaattgctgggtaaaatgatatctctgttttaagttctttgagaaatctccagtctgctttccaaagtggcaagactaatttatattctcatcaacagtgtataagtgttctcttttctccaaagtcccacaagcatcctttgtttttcgacttttttgtgataccattctgagtggtgtgttgctgctcacctacaatcatctcatatttgataaggctgatgaaaagaagcaatgaggaaaggactccctgttcaataaatgatactgggacaacgggctagccatatgatgaagattgaagctgaccctgtactttcaacatatataaaattaactcaaaattgattaaagccttaaatgtaggacctcaaaccataaaactccttgaagacacccttgaaaacactcttatcgacactagttttgacaaaaaatttttggctaagtatccaaggccagttgcaacaaaaagaaaaatagacaagtggaacctaattagttaaggagtttctgcacagtaagacaaacaaacaaacaaacaacaaacaaaactatcagcagtgtaagcagacaatctacagaatgtgagaagatattcacaagcattgcatcccacaaagccctagtatccagagtctgtagataaacaaatcaaaaagaaccaaaaaaaaaaaaaccctttaaaaattggctgatatggtttgctgtgtccccacccaaatttcaacttgaattgtatctcccagaattcccatgtgttgtgagagggacccagggggaggtaattgaatcatgggggctggtatttcccgtgctattctcttgatagtgaataagtctcatgagatctcatgggcttatcagggatttccgcttttgcttcttcctcattttctcttgccacccaccaggtaaggagtgcctttttcctcccgccgtgtttctgaggcctcccaagccatgtggaatgtaagtccaatcaaacttctttttcctcccagttttggatatgtctctatcagcagtttcaaaatggactagtacataggcaaacgacacagacacttctcaaaagaatacatgcaagtgcccagcaaatatattgtaaaaatgtttaacatcactaatcatcagagaaatgcaagtagaaaaatgttctgatttctgtcactataggaggtccctttttcttgttaagaacttcatatacatggaataaaatattatagatcatttttgtaaggggccacttttactatttgtgaggttcattcatgtaatagcatttatcaaggttttgtcatcatatgtataaatatgtatgtactcatacacatatagatatttcatatctaaatcaattacattaataaatgacagattattaaataaataaatctgtttattaagtaaataagtgacaatatgtatatctattttcctgttgatgggatttaaatttgtttccaaaataaacatcataaacccaaactattataagtatctttgtacaagttcttctgtttatattcacacattttattgataaaatatgtagatatataggtatgcattataacttttcagctttatggagctatcactgacaaataaaattgtatatatttagggtacaccacttgatgtattgatgtacctggggagatgctcatcatgatcaaggtaatcggcatgcctgtcctctcagagagttatcattttatgtctttaatttcctgtgtgtgtgtgataaaaacacctaatatctactcttctggcaaaagatacctttataatacaatatttattagtatagtcacattgctttacgtttcatctccagaactatttcaacctgtgttttagtccattctcaccctaatgtaaggaactacctgagactgggaaatttacgaagaaaagtggtttagttgactcgcggttctgcaggcttaacaggaagcattattgggaggcatcaggaaacttacagacatcatggaaagtgaaggggaagcaaggaccttcttcacatgctggcaggggagagagagagaaagagcaaggcgagatgagccacacttttaaaccatgagaccttgtgagatcttgcaagaatcacaaaggggaaggtcgcccccattattcaatctctccccatcagacccctcctacaacacttggggattaaaatttaacatgagatttgggtgaaaatgcagagacaaaccatatcattccacccctggtccatgacagatctcatgtccttctcacattgcaaaatatatttatcccttctcaacggtctcccaatcttaactcatttcagcataatcataaaaatctatagtctaaagtctcctctgacaaggtcagtttcttccccctataaatctgtaaaattaaaaaaaacttagttatttccaagatacaacgggggtgcatgtactaggtaaatgctcccaatccaaataggagaaattggccacagaaaatggattacaggtcccatgcaagtccaaacaccagcagggcagtcattaaatgttaaagctccaaagtaatttttcttttaccccatgtctcacatgcaggacacactgatacaagagatggtctcccaaggccttgggaagctccacccttgtggctctgtagggtccagcgcccatggctgctttcataagctggcattgagttcctgtggcttttctaggcacaccgtgcaagctgttggtggttctaccattctggggtctagaggatggtggccctcttctcatagatccactagacagtgcctcaatggggactctgtgtgggggatccaacatcacattttccttctacactggcctagtagaggtactccattagggctcagccccttcatcagacttctgcctgaatatccaggcattttcatatatcatctgaaatctaggaggaggttcccaaacctcagttcttgccttatgtgcaccaacagactcaacaccatgtggaagcaaccaaagcttagggcttgcaccctctgaagcaatggtctgagctggaacttggtcccttctagctatggctggcacgagacagacaggggtgtaaggtgccatgtctcaaggctgtacagagcagtgaggtactgggcctggaccatgaaatcatctttctctcctgggcttctgggcctgtgatgggaggggctgccacaaagatctctgaaatgccctgggaacattttccccattgggctcctcattacttattcaaatttctgcagccagcttgaatttctccccaggacatgggttcttcttgtctaccagatggtcaggctgcaatttttttccaaccttttatgctctgcttcccttttaaatatgagtttcaatttcagaccatcttttcatgaatgcataggacttatgttttcaggaacagccagggaaaatcttgaatgctttgctggttagaaatttattctgccagataccctaaatcatctctccctagttcaacatagcacagatctctagggcaggggcaaaatgccgctagtctttttgctaaagcataacaagtgtgagcttcactccaattcacaagaagttcttcatcttcatctgagaccacctcagcctggactttattgtccatatcactatcagcactttggtcaaaaccagtcagtaagcctctaggaaatttcaaacttttccacgacttcctgtcttcttgtgagccttctaggctttcccaacatctgtccattacaaagtcacttccccattttcaggtatcgtaatagcagtaccgcactcctggtgcaaattttctgtattaatccattttcccactgctataaagaattacttgagactgggtaatttatgaagaaaagagggttagttggcttacagttctgcaggctaaacaggaagtgttactgggaggcatcaggacacacaatgatggcagaaggtgaaggggaagcaagaacattcttcacatggtggcaggagaaaaacagcaagtgagcggggaggtgccacacttttaaaccatcagatctcttgagaattttatcatgagaacagcaaagaggaagatcacctcatgattcaatcactttatattagaccctttcttcaacatgtagggattacaatttgacatgagatttgagtgggaacgcagggccaaaacacatcaacctgcataaccgaaatttttaccctttgacctacatcgcccaatattttcctcctctcaggccctgggagctactattctactctgcttccaagagctgaaatattttacattctacatataaatgagatcatgcagcatttgtctttctgtgtctggcttattctaattagcataatgttctctatgatgctgaaaatgtaagaatttccttcttttaaaggttgaataatattcaattttatgtatgtatatgccacattttatctgttcattcataaatggatattgacttattttccatatctaggctattatgaataacctcacaatgaacatatttgatacactcacttcattttctctagatgtacacttagaagtgggtataccctatgttcaattcattcagtaatcttaatgttgtttttataatggctgtactaatttacattttgttccaaaccatacatggatacctttgtaccaaattttcaggtctacgtttaagtgttaaatccatttcttgttgatttctgtgtattttgtgagggaaggtcctttttttttttttccttagagttagaatctcgctctgtcacccaggctggagtgcaatggcatgatctcggggcactgcaacctctgcctcccgggtttaagcgattcttctgcctcaggctcccgagtagctgggattacaggtgtgcatcagcacgcctggctaatttttgtatttttagtagagacagggtttcaccatattagccagctggtctcaaactcttgaccccgtgatccacctgcctcaggctcccaaagtgttgggattacagatgtgagccatcacgcccaaccagtccatttaatttcttctacatatggatacccagttttcacaccacttgctgaagagactgtcctttgtctattgtgtgttcttggcaacttgtcaaagatcagtttattgagaagaagtgggttgattatcaggtgcctataatgttccattagagtatatgtctgtttaaatgccagcattatactgttttgatttatatagatttgattttgaaattatagaatatgatatattcagctttgttatactttccccaaaattactttggctattggaaagcttttgtatttgtatataaattggagcattttaaaaatatttttgtaaaaacatgccacggagattatttactttattgacaaataatagatatacctaatttatgggagcatgcaatatatttatacatttacaaatatgtgaagatcagatcaggattggtatatctatcacgttaaacaggtatattttctttatgctaggcacattggaatgactctcttctagttattttaacgtgtacattagattatttttaactatagtcaccttactgatctatcagacatttaggttgtatttctcctatataactatgtatctgaattcagtaatcaacctctctttatccccttctctcttgtatccacccaggcttctggtaaccaacaatctactcttcgtcttcaggaaatccaattttttagttttgacataaaagtaagaagatgccatatttgtctttctttgcttggcttatttaacttaacataacggcttccagttccattcatattgttgcaaatgacaagatatcgtattttatggctgaataatattctattgcatacatagattacattttctctatccatttgttcacctgcagacactgaggtgctttcatatctgggctattgtgagtagagctgcaaagaacatggagtgcacatgcctttatgaggcggtgattttatcttcttcagaacatacccagaagaggatttgccacgtcatcaggtatttctatttttaatttattttggagtcttcatattactttgtacaatagtggaaatgcaataggaatatccattataaaaagcagtttcagttttgaggtatgatccaaaaacaaataatgtttgaccatgattctcactgggagtctctaatgagcctggtggaaatgcaggaagttttctaaccttgttaagaaaattatgactttgcacatttttctttttaaggctggtaattggcgtgattccagatgcatactgttggcgggtttcagaatgatacagaaaatcattatgagaaggcaagaaaaagaatgatagagagagagagggagagagggagagagtcaggccaacaatgagaaaaaataaatttcacaagaggagaaagtgctggatatcagtgctgggttttggtcatagacacatctgtactgagtaagaaactatgaagtcaagggaggagtctagaatttgttcaagtgaagcatcagcatattctctgaggcacgtattgtcaccccatcataagggtgatgaatttttgaatgccatgaaatgtgagttcacggtaagtaatcatgtttccatgaaatttagttaaaatgccaagggtgtgttcagatcacccatgcacaaatacacaaaatttgcctttgcatttatagctatctagagaaaaagtgcattgagatgtcagcaggttacagagatctgtttaagtttgggatcccatgggagagtgcctcttagtgaaggttggtctattaattcagtaagtaaaaattctttctatgggagtagcttctaattgtgtggaaatttcaattccttattgagtttttaaaaaatatctcagggactgactccatggagttttactgctgtattgataaaaattatcatcaaagaccaagggtagataaaacccaaagatggggagaaaccagagcagaaaagctgaaaattctaaaaatcagagcacctcttctcctccaaaggaacacagctcctcgccagcaacagaacaaagctggacagagaatgactttgacaaattgagagaagaaggcttcagacaattggtaataacaaactactctgagctaaaggaggatgttcaaacccattgcaaagaagctaacaaccttgaaaaaagattagacaaatagctaactaaaagaaacagcatagagaagaccttaaataacctgatggagcttaaaaccatggcacgagaaatacatgatgcatgaacaagcttcagtagatgattagatcaactggaagaaaggttaccagtgattgaagatcaaatgaatgaaatgaagtgagaagagaagtttagagaaaaaagagtaaaaacaaatgaacaaagcctccaagaaatatgggagtatgtgaaaagaccaaatctatgtctgatttgtgtacttgaaagtgacggggagaatagaaccaagttggaaaacactcttcaggatattatccaggataacttccccaacctagcaagggaggccaacattcaaattcaagaaatacagagaacaccacaaagatactcctcgagaagagcaactccaagacacataattgtcagattcaccaaagttgaaatgaaggaaaaaatgttaagtgcaggcagagagaaatgtcgggttacccacaaagggaagcccatcagactaaaagtggatctctcagcagaaactctacaaaccagaagagagtgggggtcaatattcaacattcttaaagaaaagagttttcaaaccagaatttcatatccagccaaactaagcttcataagtgaaggagaaataaaatcctttacagacaaacaaatgctgatagattttgtcaccaccaggcctgccttacaagagctcctgaaggaagcactaaacatggaaaggaacagccagtaccagccactgcaaaaacatgccaaattgtaaagaccatcgatgctaggaagaaactgcatcaactaacgagcaaaataaccaactaacatcataatgacaggatcaaattcacagataacaatattaaccttaaatgtaaatgggctaaatgctccaattaaaagacacagactggcaaattggataaagagtcaagacccatcagtgtgctgtattcaggagacccatctgacatgcagagacacacataggctcaaaataaagggatggaggaagatctaccaagcaaatggaaagcaaacaaacaaaaaaagcaggggttgcaattccagtctctgataaaacagactttaaaccaacaaatatcagaagagacaaagaaggccattacataatggtaaagggatcaattcaacaagaagagctattttaaatacatatgcacccaatacaggagcacccagattcataaagcaagtccttagagacctacaaagagacttagactcccacacaataataatgggagactttaacaccgcactgtcaacattagacagatcaacaagacagaaagttaaaaaggatatccaggaattgaacgcagctctgcaccaagaggacctaatagacatctacagaactctccaccccaaatcaacagaatatacattcttccaaacaccgcattgcacttattccaaaattgaccacatagttggaagtaaaacacccctcagcaaatgtaaaagaacacaaattataacaaactgtctctcagaccacagtgcaatcaaactagaactcaggattaagaaactcactcaaaactgctcaactacatggaaactgaacaatctgctcctgaatgactactgggtacataatgaaatgaaggcagaaataaagatgttctttgaaaccaatgagaacaaagacacaacataccagaatgtctgggacatatttaaagcaatgtttaaagggaaatgtatagcactaaatgcccacaagagaaagcaggaaatatctaaaattgaaactaacatcacaattaaaagagctagagaagcaagtgcaaacacattcaaaagctagcagaacacaaggaattactaagatcagagcagaactgaaggagatagagacacaaaaaacccttcaaaaaaatcaatgaatccaggagctggtctttggaaaagatcaacaaaattgatagaccactagcaagactaataaagaagaaagagagaagaatcaaatagatgcaataaaaaatgataaaggggatatcaccaccgatcccacagaaatacaaactaccatcacagaatactataaacacctctacgcaaataaactagaaaatctagatgaaatggataaattcctggacacatacaccctcctaagaccaaatcaggaagaagttgaatccctgaatagaccaatgacaggctctgaaattgagacaataattaatagcctaccaaacaaaaaaagtccaggaccagacggattcacagccaaactctaccaaaggtacaaggaggagctggtaccattccttttgaaagcattccaatcaacagaaaaagagggaatcctccctaactcatttcatgaggccagcctcatcctgataccaaagcctggcagagacacaacaacaaaaaaagagaattttagaccaatatccctgatgaacatcgatgcaacaatcctcaataaaatactggcaaaccaaatccagcagcacatcaaaaagcttatccaccacaatcaagtttgtttcatccctaggatgcaaggctgattcaacatatgcaaatcaataatcgtaatccatcatataaacagaaccaaagatcacaatcacatgattatctcaatagatgcagaaaaggccttcgacaaaattcaacagcccttcatgctaaacactctcaataaactgggtattgatgggacttatctcaaaataattagagctttttatgacaaacccacagccaatatcatactgaatgggcaaaaaccggaagcattccctttgaaaactgtcacaagacagggatgccctctctcaccactcctattcaacatagtgttggaagtatggccagggaaatcaggcaggagaaagaaataaagggtgttcaattaggaaaagaggaagtcaaattgtccgtgtttgcagatgacaaggttgtatatttagaaaaccccatagtgtcagcccaaaatctccttaagctgataagcaagtttagcgagtctcaggatacaaaatcagtatgcaaacatcacagacattcctatacaccaataacagacagagggtcaaatcatgagtgaactcccattcacaattgcttcaaaggggataaaatacctaggaatccaacttacaagggacgtgaaggacctcttcaaggagaactacaaaccactgctcaatgaaataaaagaggatacaaacaaatggaagaacattccatgctcatggataggaaaaatcaatatcatgaaaatggccatactgcccaaggtaatttatagattcaatgccatccccatcaagctaccaatgacttttcttcacagaattgtaaaaaactactttaaagttcatatggaaccaaaaaagagaccacattgccaagacaatgctaagccaaaagaacaaagctggaggcatcacgctacctcacttcaaactatactacaaggctacagtaatcaaaacagcatggtactggtaccactacagagatatagatcaatggagcagaacagagccctcagaaataataccacacatctacaaccatctgatctttgacaaacctgacaaaacaagaaatggggaaaggattccctatttaataaatggtactgggaaaactggctagccatatgtagaaagcttaaactggatcccttccttacaccttatacaaaaattaattcaagatggattaaagacttaaatgttagatctaaaaccataaaaaccctagaagaaaacctaggcaataccattcaggacataggcttgggcaaggacttcatgactaaaacaccaaaagcaatggcaacaaaagccaaaatggagaaatgggatctaattaaactaaagagcttctgcacagcaaaagaaactaccatcagagtgaacaggcagcctacagaatgggagaaaatttttacaatctacccatctgacaaagggttaatatccagaatctacaaaaaacttaaacaaatttacaagaaaaaatcaaacaaccccatcaaaaagtgggtgaaagatatgaacagacacttctcaaaagaagacatttatgcagccaacagacacatgtaaaaatgctcatcatcactgaccatcagagaaatgcaaatcaaaaccacaatgagatgccatctcacaccagttagaatggtgatcattaaaaagtcaggaaacaacaggtgctggagaggatgtggagaaataggaacacttttacactgttggtgggactgtaaactagttcaaccattgtggaagacagtatggcgattcctcaaggatctagaacaagaaataacatttgacccagccatctcactattgggtatatacccataggattataaatcatgctgctgtaaagacacatgcacatatatgtttattgtagcactattcacaatagcaaagacttggaaccaacccaaatgtccatcaatgatagactggattaagaaaatgtggcacatatacaccatggaatactatgcagccataaaaaatgatgagttcatgtcctttgtagggacatggatgaagctggaaaccatcattctgagcaaactatcacaaggacagaaaaccaaacactgcatgttctcactcataagtgggaattgaacaatgaaaacacttggacacaggatggggaacatcacacactgggtcctgtcatggggtgggggtagtggggagggataccattaggatatatgcctaatgtaaatgaggagttaatgggtgcagcacaccaacatggcacatgtatacatatgtaaaaatcctgcacgttgtgcacatgtaccctagaacttaaaagtataataaaaagattatttaatatgattccttccagtgtttcaagaaaactttttctccaaaattttttccagcgtataaatttttctggctgaatattataagaggctgttgctaaaaagacatactagaatggcagctttaatctgttcatgataggagtgagcataatacatgatctctttgagtgttctgcctcatccaaatgcagtgtggcaaaggctaatattggaggtaaaacctctaaatgaattttttccagctaccaagtcataggacaatagcagatacgtccttgaggtagaggaccataatgccacagtgttagtagcagtacatttgtccaagggagttccagggtttattaaaattatgataattttaatgtaagaataccattcttttaaacttatgtggaagattgtaggaggttttcacaatgttgtcctttactatcagccatgcctcacataatcactttataatactttcatgggtgttcttcactcagttcatgcaaaccctggcagtttataggctaaaaacacaaaatacagaagcttttaatcaactgaaagagctgtagccttttctcaaggaattatttcaagacacggagaacacagatggatgataaataaagtacattcacatccccttaagggtagaaattgaggaaaatttacccaaaggtgtccaaagggccctgtgacttggtttctgtctaagtcccagtgttagggttcttccaggattttgtggctagctcgtcactcctcatcaagaattaacctctgctgtttcctcaaagtgtttatttaatctgataaccagtttgtctataaattatagagttgaaatgcaacaaatttcatttgaaataatctggcacaaattatctaagcaaagtcgataatgatgttttttcattcatttgtatttaagatcatcagctaagcgttgatatttttgataacacccatgtctctctcagcagttttgtcttctgaggatatgatctggcgtggcagttctcttagcttcagtgttacctctttttgccttgacttccacctttatatttgcccggaatctgggatataggagtgcctctaagagtcccctaacttgcccattttggtgagtgttctggaacctatgagatgctcttttgtttacaaagcaccccaaagccatgtactgtgccaaaaggtgtttatttcctagtttgacaaattagaaagttctaataaatacaatcacttctgccatctgggctgattttatatcagatagaggactgtgttctaaaggaaatcttacattagtaagagcaattttagtcattaacctagagttgtactattgaggtgcaagtcataagaaataatattaggtcgaggttctcagtgggagtgtctaaatgtcttgtgtgtacagggtctcctctattaacatgaagcatttttgagcacagtcagtttccagctatgcttctccctgtctcactatcaccacaaactaactatgaccccacctggaacctaggttaatttccaaataagtcattctttaatctttgtgcctctagattattatgtgagtcaatttcagtagaaacttaaaaagaacatttgaacggactaaacaacacagaaaaacactaataaaatgcaaagcctagatgtgagaggctccaggcctggataatggaacacttcatgtatgcaggtaatttcttttcccaattcaacactgatacacccagcatatcagcttcatgccccattttactcctattatgtagagatatggcaatgacattctcaaggtccacacacatatatgaaaattggtaggactaggggaggagatgagtctgcacttctcctctgaaggaccaggaaagcctggacagaccatctccccggcctccatgactgcacctcctgcccacatggacactcacccctgataggataagaggattccattgatgaggctgagtattttatgatataagttactagagagtgacattgaggtttcaaaaactaatatttataacctaaatttaatttcccccaaattgttacctctttcttcagtgaaaaattgcttgccgtgattgagatttaggtagattccaaatgttcacaactaagcttccaagagcgtattgggagcaaaaactgaatgagggtagagaaacccatcatcatgtattcaacactaaattcaagtggactcagcactgcctttgatcactgctgcttctctgcagagttcaggtttctacttctcacgattccaacatagactctctctctcccaaatgtttggcctccacttgctgtaaggtcgcactctgttcttagtttgttctctgaaccattttatgagggtggtgatgagccatttaatggaaattttatatcatttcagctgaatcccatgggggatcatgaattattcttctggttatagtaatggatttttcttggtgtgttcattaccagtaatattcaaagtcatttcatttaaatctttgatgcttcattttttgttgctatgacattctttcttctattgaatcttcccactaggcattataacatggatctagtatccaggctcagttgtcatcaataataaccacatatgtcaaaacctatgtcttctttccacaggagacatatttttctcttttcaggggatgaacacacactgctgagtgaccccactcacaagtacatatacacaattatgagatttttatttatttgactaataagatgtatcattctcccttaaaattcttcaacccccagaagcccgtgacaaactcttctgcatctgttcataccataaactcagaaaacaaaccacatggtgagtaaaagctcacacggttctggatatggggtccatctcttcccctgcaatgtcctgcagcacctcagaccacctgtcctggttctatcaaggaagtttacctccagcacagtaaagaaaacaattgaaggaggagagaacctgcagatgatagacaatattcaaaactattcatatgacaagggattactatcaagcacataaactcaactgaactgcaaataacaatatgattaataatgggcgaataacatggataaacgtctctcagaggaagacatgcaaaggatagatagatagatcgatagggatatatacatacatatattgctagaaataactaatatcaggaaaatgcaaattcacaatgagctatctttccttaatctttgctggaaagtctgttagcagaaagacaacataaggaaaacaaaagctggccaggcttcatggaaatgaacacttttatagaccacttgtggaaatgtaaattagtacagccatcatgggaaaaaaaagacaactaccatataaatcagcaatgcaactgctgagtgtgtgtgtgtgtatatatatatatatataaaattaaaagaaaaaactaatattgaagagatacctgtcgacccatatttattgcagccctaaacacaattacgatatgaaattaatgtatgtgtccatcaaaacgtgaatgggtaaataaaacggggtatatttacacaatggaatattattcagccttaaaaatgaaattccgctgtttgaaacaacatggatgtaactgggaaccgttgtgttgagtgaaacaagccagacacagaaaaaaaaatacctcattttctcaatgttatgtagaagtttaagaaagttcatcttctagaaggaaatagtagagtagtggttatgaaatatcagaaatgggtggaggccgagagataagaagtggtttgttaacaaatgcacaattacaggtagacaggtgggatacgctctagtgccctacagtgcagaagggtgactacagttaacaatatattgtacactttatgtttacaagtagccagaagagagaattttgtatgctaccaagcaaagaaatgttaatgtctgagctgatgaattagctcgttgttctgatttggtcaaaccacattgcacagatgtattgaaatatcacactgtaccccataaatataaacaatcattatctgccaacttaaaaaatcctttaattaaaaaagattttatttgcatacattacaaatgattcaacacagagccaggaaaatataacatttttatttgaaatagttaaattcctaacaaaatagttacattctttggcaccaaactgtgtatttgatcatggtaagtatagacagacttatgcaaagaataatatattttaaacttagacttctacttaatactataaataaaaataattttagaacagctaagtaaaaggaataaagttgaggaaatgtgtgtgtggtgtgtgatgtgtgagctttttcttgtaaccacactgtccatggtggatgtgtggtgtgtgtgtcttgtgtcttgtttgtgtttcctctgctaggggttctctgtgattctaggatctgtagctccagtgtgtttcaaaaaattgggaacattcttagccattactttttcaaatacttctctttatctgcaatttctccttttcagaattaaaatatacatatactacactttttgatattaatgtttagtttcttcagtctctgttcctttgcaatttacattgtgaattttctagagacaatttaagtgcatggtttcatttaaaagctgagccagctctactgaggggtatgcccaaagtttgctcaatgtttatactgcattgcttttggtttcttatgcacttccatttgattctttcttaatatttatatctctcagttccctatctagtcctgcattatgtccacagtttcttgaagagattctcacatatgaattacaggtactatacatatcttgtttaatcagatatttctaatatctgtatcatttacaaatctcattctgaacatttgtttattgtgactttagtatttctcattaatataggtaataattgttgttgataaccagacatgttgggtcagacaggggatattatcttattatttcattttatccattttctgcctgtatgtgaccacactttatctgtgccaggcctttaatgtggaaatgtctgaatcttctcagagctacatgtgacatttacttgtggagtggacgtcagagttgaagtctgctcttctgtgcccgacagagacttcagatcctccagtgataccttgtttttctttcctgcttggctgtgtctctacacctgttccctcctccagagaatctccttcagttccttcaggggggttaagatgttatattcaactgacaattgtaaaattgtcatagaataaagggatatttagaataaagggatattttctgacctttcatgggtccatattgtgatcctgagtctgggtgtgacctttccattgtttctgaacttcctccagatgagatgttggtctgtgtgttcttgctgttttccctgggtgagagtcctcttgttttccccagttgttccctcccacagctccaatgttctcttttggtgttatcatcttccagatttgctgacctgacccatagattaaggctctgattcagtatgaaagggggaggtacttctcaatggaacttaagtaaagacctctttttccatctcattttctaagggattgtcccagtgcccctaagatcctggttttggtggcttgcccctgcagagtaatttcttagttcctgcaatggggataaaggaggtgagtctgaatgcatttcaaagtgtgggttctttttctctcacagacagacacattggcacggaaagatttttgtgactctccacattattgggaaaactgattcaagaggataggaaagctcttcagtatgtggtccctgagaaattcatacaacaccttttaccacacttgacttcaagcaatccaatatatatatgtgtgtttttctcttgtagtagcctacattttacatgccagactctgcccagttcagctcatatcctggccttgttactgcctacaagaacttgcctctccctgcatttcagatttgatgtttttcttaaaacttcaagtatttaaagtatttttaaaactttgcaaaatcccattttgctctgtttacctgatattgttgatgttgttattgtaaaaagtaagtagaatatattcctcatctatgtacgtttcaaaactgagttgcagctttttttggtaagacccagagtcataaaagactgcaaatactgttaagctgcttaacagaaaaacaaatgctggtaaatgtgttcactggaatactacccgtcatttataataaataaatgcctgacacacagaacaacataaaatatctaagtatttataccgagtaaaatatgccaaacaaataagaatatatactatgtcatttcattttttataaatgctgatgaataaaaaatgcatctgaagtaaaataatgaggatccagtagttgctgggggaaatggtagaagggaaggggagaggaggaggaatacagcagaataagaggaagtgttgagaagaattcacttgtccactttcttgataatgacgacagttacatcacgtttattaattgcacattttaaatatgtgaagtttattatctttcaattaagccacataaaatgtattacaagcaaatggaaatttagacaagcacggagtaatagaaagatccaaacatatgttaaatgtcagaagtatctgaaaattagtgtgtctggaccctagttctctccatattttcaggtgagtgctggtggcaacatcacacatgctcttactacagaaagtgggttctgaaaaccacaccaggcacgtccagctttgtcctggagttggtttagggggatgtcacagccagtgacggaggagcacagggccagataccagcgttcacttatcccagacatgaactcctggatgcatacagagccccctccacttgtgggtttacttccacttctgtaaaaggagaaaatattgactcctacagaacataatttacacaaatatttacagatgaaatagggtgatcagggcaaagtgtttatcacagcacaatttcataagacagcatattttccaaataccatcgtcagcaaacatctgcagggcaccgtcttattatctgggtacagcctattcctccagcgtcccaccctagagcttgttatatagtaggagatatgcaaatagggacctccctctactgatgaaaaccaaccgaaccctgaccctgcagctctgagagaggagccttagccctggattccaaggcctatccacttggtgatcagcactgagcaccgaggattcaccatggaactggggctccgctgggttttccttgttgctattttagaaggtgaatcatggaaaagtagagagatttagtgtgtgtggatatgagtgagagaaacggtggatgtgtgtgacagtttctgaccaatgtctctctgtttgcaggtgtccagtgtgaggtgcagctggtggagtctgggggaggcctggtcaagcctggggggtccctgagactctcctgtgcagcctctggattcaccttcagtagctatagcatgaactgggtccgccaggctccagggaaggggctggagtgggtctcatccattagtagtagtagtagttacatatactacgcagactcagtgaagggccgattcaccatctccagagacaacgccaagaactcactgtatctgcaaatgaacagcctgagagccgaggacacggctgtgtattactgtgcgagagacacagtgaggggaagtcagtgtgagcccagacacaaacctccctgcagggtccccaggaccaccaggggcgcccgggacactgtgcacgggtctgtctccagggcaggtgcagttcctgctgagggctggcttcctgtcatggcctgcggcgccctcattgtcaaatttccccagggaacttctccagatttacaattctgtactgacatttcatgtctctaaatgtaaaacttttttgtcctttttgtttctttgtttttgtaacaggaggacacaccctcacctccacagaaaccacagtgtcactttgggggcagatgatccttctgtggtcagcaggatgaaagttccgaggaatctcaggggaacccgaagagtgtttgccagttagactcagggcagcgacctccacgggaatctctgattagaacaggctttgagttctgataggagccaagagagacgctcacacagggtcagggtccttaaagcctgatggttttcacagctatcccccctggtcttgtaaaactgtgtacatatgactcagactgattcacttgaccccctttctgctaatccattttccttctctgcatacttgattctcacaattccctttcttctcttccccgaaaactgaggatgtgttttctgtagtctaaattccagggctcaggtctgcaggacctgggtaggctacggggactttctcactcaccattgtctggactctcctgttgtcgtctgtgaacagagatgtttggaagatgaagtggacattagtcatgaagggaataatactagttttctccaatgggatactgatgtagagctggatcttgtgcttctcacactgtcacagagtttggactctcacccgtgactttgaggagagctgaggatggacactccattgtgctgtgagctctgggtaacaatagtagggccctggctaggcagcctaaggtcaatactgctggccttcaggaaagacaggctggaattcctgggaagacctgcatctgccgtccaccatggagtcccatcgtcttctattatgccctgattgaatcagccccacctaggttatctagaacactcttcgtgacttacgaaaaaataatgggaggctctactaacacctgtgttatgccatgggagcaacacctaagctagtgtgtgattgagtagatgagactgtggtctagtcaaggtgacacataaaattaattgttgccattataatattttattatatatttggcaatatagtcgtgctcatattataaatacttttgctacgttgttgttatgtcagaagcttttgaataagaacagcttcatcttgaataggggctaggaaaaataagactgagacctgctgggctacgttcccagtaagctaaggcgttcttagtcacaggatgagataggaggtctgcacaggatccaggtcataaagaccttgctgatgaaggttacagtaaagaagctggccacagcccaccaaaaccaagacagtcacgaaagtgatctctattcatcctcactactcattatatgcttattgtattgccttaacatgctaaaagacactccccctagtgcatgaccgtttacacatgtcatggtaacatcaggaagtttccctgcatggtctacaaaggaggggaggaaacctcagcttcaggaattgcccaggggactcatgaataatccatccgttgtgagaaatacattcatccctttgagagaaaatgcacagggggtggaatgaggctgggaagctgatggcacatggtggaagcctgtccctgagtgaaggagagggggaagctggattgggtggaaggtctctatatttgtgtgctgtgcaaggaagtgcaaaatataattgagttttgtgcaagtcagtgctgcctctcaggtgatccccatgactcccagaaatggctctgcttaggaatccctggggagtcagtcatttcattagagtagaccacaggacatgggcttcagcacacgccatgccacagatgtcagaaagcagctgctgggaacctgacccacctgcattttgctgcctgtaggaaaaggcagggaggtgcatcctcagggacaacaca

SEQ ID NO: 33 - DNA, 200000 bp, Human
ctgttttggatttctataaagaacgctgcttttactgtgttttattggaaaatacatgaacaaatgtgagcctgcaaacaattgtaattttcagttattttaattgcattcatttgtaattctgcatgatatgctgacacagagtcgcatttttcatagatattgttcaatgaatcaagaacatgcattttccactttcactggtttttctccgtgtgcagagaccttgagtagagcctgtctggcccttatccacactatctcttgtgtccccgggaaaaagcagagatttgcctgactgcagaatctggggtaggagtctgctcagctcacagcctgcagagaagcccagtgaagttttatggagtcagagagctttcccatgtggggaacctctagcttacccatggccagagattactggtcagctgtaattgagagtttaacaattagagcactcagaagcctatctcatcgcagcttcattatgtaacttaccaccattagactgcggtaataactcaatcttgatttttctgaccccattttctcatcttattcatttgtaaattgggttatagaaaatgttatgttttagactctgattcaaatctcagaagtttatgaactcatcaggaataatacaaaatgtgtctagttttggggaaatgtaaatgaatgtccatgcagtgtgtgtgtttgttgtgtggggatatgtcagtcacaccccaatgaacatgatttctgaattacatcatcaaactacaattagatttgctgaaaattgcctgcagtaatgtctgtgatgatgaacctgtcaccttgttgtgaggatgctcagtgcacaggcgaggttgcacaggagacatccaaggagcagcccccaggcttggcagaattcctggccaggagccagacataggactgggtgtctcaaaagcagattccccaaccccatccctttatttggactgcatgggcatcatgaggaccagcaggagatgctcagaactcactcaaggcagagcaccatttaggagcaggtgcagcgaggaaacagccagagaacctctgactagaagcttgggttgttttcttttgcttaagagcatccaagcctaagtatatcaaccactatatgtatatatataagtagactatccactatatatagagagagatagatataatctgtatatatatacagattatatctatctatatacattatatatacagattatatatatatataatctgtatatataagaaagttatgagttacagattatatatatacatttatatatatacatttatatatatttatatacatttatatatatacattttatatatattatatatatacagagcaaaacgaggttaatatgactctgccattaactccttgaacctgggtcattttttctgagaatgccgtcatctacagcatgatggttctcatgtcaaaatcaacacgcatagttagtcaccatgaagactgttttatctcatggtagaaatgtttatttaattaaaaaattacatttcatacgaaagggtctgtattatttctttctcacactgctgtaaagacatcacctgagaccgggtaattcgtaaaggaaagaggtttaatggactcacagttctgcatggctggggagcctcaggaaacttacaattatggtggaaggtgaaggggaagcaagtcccttcttcacaaggcagcaggatggagagagagagagagagagagaaggagaagcaggataaagagccggaaacttatcagacaaaccaatctcctgagaactctatcaggagaacagcgtggaggaaaccactcccacaatctaatcacctctcaccagacccctcgcctgacacttggggtttacaattcagtattagctttgggtgaaaacacagagccaaaccatgtcagaatttctaggtgagaattggtcaattcataagttattagtgaagtatcagaaaaataaatagcaccagtgttgttgttatccagttaatttataaaccatgtcaatatccattttatgagaggtgtaggaaaagtgtgagatggatagatagatagatagatagatagatagatagatctaccaaatacaatatatataactatattatatatattactatgtatataatatgtagtaagtgatatatggtatatatatatgacattaattctaccaaatacttcacatatgtatgtgcatatatatataatattaggtatgatatatatatgaaatatcaggacatatatatatatatatattttataatgtctcctgggatttagtgttgaattttttaatatctacatgtattccaggataaatgttggtggacttcataaaatatattctaatttttatgtgcaagatgatcactttcaaataaggtttagctacagaaaccagatgtatctttctaccagaaattactggaaagcacagtgaaatttcttaatcaggattttaagatgcttgacaccactcaacaaagacagtgattactaagagagagaggaaataagcataaggagccctccggtgaatgcaggctcagatacttcctcaaaggtgttgccaggctacagtgctggagtggaaaccatgtggatttagcattaataaaatggagctggaaacccatgtaggccaagaagtgtggataccacaggatagcaagtggattgcagaaaactgtcagagagtgaaccccatagatggcaggaggaacacccagacttgacagagtgcagatcagtgtgtagaaagcagggaaggttgtacgtgagaacacaccctgctgcaggaagctctccctaaaatccagagccatggtaaatatatgaatatacacttacaaactttaaaacatacggaaaggcaccataataaagtcaaataaaggaaaggtgggttggctacattaaaatataaaaagagtatttctgagcaaataataatacttatgaggggaacaattttattctaccatggcaaatgatttcagagaacaacattcgaaatgcttatggccataatgaggaagcttcaaacaagtatacgaatagaattattaccagagtggtagtaccagagccctcagctttctgatgaaaactgattcttattatgaaagctaattattattataagcttattattattaacactaattattattaattataatattatataattattataatattattatgaaagcttattattattatgaaactgatattactagagccctaagctaagtgttattaccagagtcctcagctttccgatgaaacaacaacgtctgataaaaattgtaataacccaaacatataaaatcaattcaaattattctaaggatgcacagtaaataaaaatcattgattgataaagtgtgctgctatagactgaatgtttatttccgccctcagacatttgttggaattctaaccccaatgtgatggtgttacgaggttgggccgttggtaagtgaatgggtcacctttggaagatgactaggccccatccaccctcatgaatggaatcagtgcccttgttagagactccagaaagctccctctcctcttccaccaggtgaaggaaaagtagaaagatggtcaactatgaaggaggaagcaggttctcaccagataccagtttcaaagcatgttggccttgcacttgctgaccttcagaattgtgacaaatacatttatgcttgatctgaaccacccagactattctcttacagcagctaaaacatcaagtctcagctagggcagtgagggcccacaatacttgagagacgagcatcaccctctcctttccagttcaggatgacagaagcttgatctcgggctgaactgacaagcagagagtccttcctctcccccagatcgcagttgaggccgtggtgtcagatctctgtggttgagagtgaattccagtctgtgatttcatggatgcctttcttcatctagttccacttatgagacagagattccatgctatgagttataggccaagaatagaggaaccccaattattcccacccagctcacctgtagggcagaggatctggagagctttctgggtgaggcacaaagagactgtatgagtccacccctcccatgcagtttcctgtacttaaagcagaggtgtccctctgacacagatgaaccctttcttccgcaccaaggcagaggcggttatatttttacagtggcagacagagggcataaaaacagaaatgcagagctctctctaatggatgtgactttatttgcagtaaaaggagaataatttcaaccctaggttttttctaaaatattataaatatttatggtaagttattaatagaaagctggtggcttcatgagagcaacacattaaacaggaatccactcatttcagcggacagaaggagaaaaaccataatttaggaataatgagctgggcactgtggcactgcctgtggttccatccacttgggagtctgatgtgagaataacacttgagcccaggatttcaaggccaacctgaaaacgtagctagaccccatttagtaaaataaataacattttggggtcaggacaaagttcaaaaactgcccctgaaatgaagcccaaatttaattgtgtaacactgtggattaatggatgacacaacagtgtcaccatgcctgctgtgagtgcagtgtaacacttggatgacatatgaagagatacagacacccaaacagagacatcagacagtgaagctgtcaaaggctgcactgccgagcgtcaggctttttatggaaaccgtgtgtacatctggaactgcacctgggaatgacgacatcaaccctttaatagtgtcggggaaagagacgtcactgaaatagacaaactaagggactcaagaaataaatagagcgattggttttaccaatacaccagagcgttttgggtgatcactattcagagtttctgaattgtgttacctaactgtcattcagaaaataattatgagatacacaaagaaaaaaataacgtcacgaatgtacaggaaaatttccagaaaacacaaactgtctttgagttggtacagattttggacttaacaaatggagacttcaaaacaattattataaaaatgcacaaatcacaaaggaatactatcctagaaaagttaaggaaggtatgatgacagtatctcaccaaaagttaatatcaataatgagagagggtttttgaaagaaagttatagacacgctaaaattaaaaacacagtaattcaaaactatatgtcagaggtgataagcagtatacttgaacctaaaaagaaaaaaaagcacacttagatatatattagtagatatgctatattcaaagaatagtgaaaattgcaataaaatgaaataagcttaacataaaaggtggacccagctagacaaatcaacatatgtttagtgtgaacattagcatgagaagagagaaagaaatatgtcacaaaaatatgtcataatataatgacagataattccatgatttttatgataaatactaatatacacattgaagtatgaatagctcaacaaactcaaggtaaaataagttataagagatcctcaacaaaacacattataataaaatattttacagaaaaactactgagaaaatcttgaaggcagtgagagaaaaacaacttctcatatacaagataattctatcaacagctgatttctcatcaataacagctaatgctaaaaggcagcaggatgacatattttccctttgtatcccattttatcctcaaaggccacctgcatacaaagtagaccagtcttacaagaaaatcacagccctagtgttcttctctcaaggagcccggctatggacctaatggtgccctccccaaagtcataagtataattcccaacctgcaatgttacagtatttggaaatgagacttttgaaagtgatagagtttgaatatttgtcctctcccaaggtcatgttgaaatgtaatcaccaatgctggagggggggcctggtgggaggtattggataatagaggcagatccctcaagaatggcctatgcaatccatgtggtgatgagtgaattttctgttagttcgcatgaaatctggttgtttagaaaagtctggagcctcctccatctcttctcttgccctttcttggccccatctcttctcttgccccttctcttgtcatgtaatgcacctgtgtgcctgctgcctctttgccttccacaatggttataaactttctgaggccctcacaaagcagatgctggcaccacgcttattgtaaagcctagcaaatggaaagccaaaatgaaacctgttttatttataaattttccagcctcaggtactctttcctagcaatgcaaggacacagcaacacagaaaattggtatcaagaagtggagcattgctattaaaaatatgtgaaaatatggacgcagctttggaacaggataaccgtcagggatttggaaggtttggagggctcagaaaaagtcaggaagataaagaacagttgggaaagttttagagactggttaaatggtttgaccaaaatgatgaaataaatatggacagtgaagtcaaggcagagaatgcctcaaatgtaaatgagaaagttatagggaagtgaagtaaagatcgcctgtcaagcaaatcacttgactgcattatgttcatgtcctggggatctgtgcaagtttgaacttacgagtgacgacttagggtatctgacagaaaaaaaattgtcagtagcaaagcattcaagatggagtctgcctgcttctaacagtctaaaatcaggtgcagaagtgaataaatgacttaaagttggaacttctatttaaaagagaagtggaacatggaagtttagaaaatgtacagcctggttctctggtaaagaaataatccagttacactgtgaagcaaccgcttgctagaaagattagcttgactaaaaaggagctgactgtggtaatacgaaacaataggaaaatagtcttgaagtcaattcagaaatctttgaggccaattctctcattacaggcttaggtataggagcagagaatgtttttgggggtgagaccagctagggctcaaaggtacagctcggttcaccacgtctgatggcgcaagctgtgatccttggtggcttccatgtggcataaagcctgggtctgcacagtatgcaagagtcaacatggcttggtgactggcctctagatttcagaggatgtgtgagaaaggctaggtgccagaaatgagcctacctcagggtcagagtacacacagagtaatttttccagggcaatgctgaggtgaaatgaagagttaaatcccccaaaagagatccccaggagaacactgtgtagtggagctgtggagagaaggtcactggccctctagaacccagaatgggagatccaatagcagcatgtgccccaagcctagaaacgctgaaggcactcagctctaaactgtgacagcagccgtgttggctgcactgagaaaagtcacataagcggttttgctctcagacttgcgagcccataattgcaccggctgcaagatgtggagtcactggtcactttggaggcttaagatcgagcgcctgtcctgctaggttttaggcttgcatagagcctgttactcattcatttggcaagttcctctcttttaaaatggagatgtttacccaatgtccgcaccaacattgtacctttgaagtaaataagttctttctaattttacaggctcacagatggaagaaatgtgggcatgaatcttagacaagactttggactttaatggtgaaacaagttcagatttaaggggcagatttcgaggggtgggtattgggaagaaaatgatcccattttgcagttgagaaagatataagattttgggtgataagagttatgtggcttccatatatgtccattcaaaaatctcatgtttgactgttatccccaatgttcgttggggttttgcgttacgggggcggattcctcctgagtggcttagcgccatccacttggtgacgagtgagttctcacatagttagatcactcaggatctgattgtttaagggagacgtggatctccccctttccttctttcccctgctcaccatgtgacactcctgcttcccctgtgccttttaccagaaatataaggtttttgaagccctcaccagaagcagatagcagaaccacacttcctgtacagccttcaaagcagtcagccaaattagaatttattttttataaatttctcatccccaggaatacttttatagcagttaaggaatttctataagaaagaaagtactgaatttaaaggagacgatgagggtgaaacatcagaatgaaattactgacctcaggagtaaagacaccagacagtctctctctctctacttctctctctctatttctctctctctctctctctctctcacacacacacacacacacacacacatgccctaaatgaaaagatcatatgatcaagtaacaatatgatggctgctctgagccaaaagtagaagcctcaaactaaacctatcttgtcagcatcttgatcttggagttcacagcactgataaatggaataaaattaatgttgcacgagtcaccaagtatgacagtttgtaatggcagcttaaactgacgaaagaaaatttggggttaagaagaggaaatctgatgttacaattatttgaacattgtgaaagtagcttggaattgggttatgtgtaacaggatggatacctttgacatatatgaagaaatttgcatattgagggtcatgctgatagacagaaatgagtggttttggaaaatggagcaacagtcatccttatcataaagttttttaaaaaaaacttggctgggcagtgatataatatttagtgaaagagaagttgtgagtagtgagaaattgtgagtagctgagaatagttctaagtgttgaagatattttgcttgattcctcctgagtgcttaaaataagtgaggtagataaattaaaatcagaaaaaaataaaagaaaaagaatacaaaagctgagggcttagaaaattcacaacctatccatattgcaaaaatcagaaactgtattctacaaagaacactgagtatatggctcaaatatcactcagtaagaagcttaagatactctatgaaaagaaatatttcaggttttaaagaatgagaattgacctgagacaaatttgatgaatactgttagatttttcagatttaatggcctggaataatagagctacttggctgcaaatgtacacaattcttccagaagagagaaaaataagctttaaatttatttagaaaccatcagaccactgcctctatttcaacagaccagaaagcctgtttctaaaatcttgaggaagaaaccacccaacagaggcttgggttgggagcacccagcaagccctgtgtgtagggctgcatgaggcccttgacatgggagctgggcctagcagtgcctcaggagcggtgcctctgcctgcagctttggagctgattctgctgctcgaataagctgagaaggaaaaagaatgtttcagagaagattacagtggaggcttaaagcatatggaaatttgttttcctatgcattgtatttgctggagacaaaccacccattttaccccctatttttttctttggcaatgaagctttctattctatgcctaattcaacaggacacagcagcggctgtatccagtttgacaagattcagcatgaaaggttcctattacctgtgccggatgcatcactgatatgcggccaccagtttcttaggttcatatcactttaagggaccaaatacaaatgtcaatagcatatgtcattcttaaactgcagaaatggtgtcaaagaagaatgtggagataagagagcaggaggaattatgaaaatccagatagcatcttctcttctagagtggaaggtacactagtaatttcatgaaacaataaaatagatgaaatgtgtcatcatcatggagtgtctcacagtggcagtgcacaaataaatttctaaaaattccataaggtaggtgtgatggatgaggcttatttccacacagggagcccataaatacccagataagtaaaaaatccaacacctggaacgaaaaatgcctcatcttgacatcacaaacccatctcagtaagtccgaggagtaatgtggaaatgaaacggaaaattcacaaacacatttattgtgaaatttttagcacatgtttgaacattaaaacagaattgtccacaattttaggaaaaccactccatgacaatgagtcactacactcatagaaacaccactgagtcaacagagttctaactgtcagcaggtcagtactgaggcctcaggagaatcaaggctctagggtacattttacagaacccagaattgagccacacaatctatagccaaatgatctttgacaaacttaacaaaaattaacaaaaatatacaccagaaaaaggacaccccattcaataaatggtgctggggaaatggaaatgaacatgcagaagaacaaaactagacccctaccctcaacacatacatactcaacacaaaatgaattaaagacttagatataagacctcaaactataaatgtactcaaataaaataccaggacaactcttctgggcattggctgaggtaaagaatttatgactaacaccccaaaagcacacccaagagaaaaatagacaaatgagacttaattaacctaaagagatatttcgcagcaacagagtgaacaggcaagttgcaaaatgacagaaaattttcgcacaccttgcctttgacaaggaactaacatgaagaaattacaaggaattaaactatacaacgacaacaacaggaagaagaaccaaataaccctattaaaatgagcaaaggacatgagtagacatttccaaagaacacatacaaatggataataaatacataaacaatgctcaacatcactaaccattagggaaatgcaaattaaaactacaataagatattatcttacaaaagccacagtggctattattaaaaactcaaaagtatcagatgttggtgaggatggaaggtaacaggaactcatctacactgtagatgaggatgtggacgaggacaacctctatggaaaatagtatggagtctgcccaaaaaactggaaatagaactgccatttgatgcagcaatcccaccactgggtaactactcaaaggaaaataaatcattacttcaaaaagatatccatgcttctatgtttaccacaaaactattcttaataacacacatgtcaacctgagtgtccaccaacagatgattttataaaagaacatagcacgtatacacaattcaatactagtcaaccacaataataaatgaaactgtcttttgcagcaagatgcctagaactgggaacaacataattagtgaactaactcacaaacagagagtcacatgtcacacattattatttataagtggaaggtaacaacgtgtccacaaggatatggagagagaaatgatggacaccggagacttagaaggatgggaggtggaaggtgggagcatgaggagacattacctagtgggtacaatgtacattatttgggtgagagtacactaaaagccaagaccactgtggaatatatccatgtgcaaaagttgcactcatagcctttaaatttatataaataaatgtacaaacaaaaaaattaaaaatataaaataattaacagttgaccaatgatcttaaagttaaaatttagaccaggcgtggtggctcacgcttgtaatcccagcactttgggaggtcgaagcaggtggatcatgaggtcgggagtttcagaccagcctggccaacatggtgaaaccccatctactaaaaacacaaaaattgaccagatgcggtggcaggcacctgtaatcccagctactcgggaggctgaggcaggagaattgcttgaacccaggaggcggaggttgcaatgagccgagatcatgccactgcactctagcctgggcgacagagcaagactccatctcaaataaaataaaataaaatgtaaaaaatgatcaataaatgaaattactatcagttgaaactcattaaatttaaagacattttctactcaagtaactataagaacatgaatgtcaagtttcagatgggaaactattttcaaatcagataaccaccaatttaattataataagaactctcaggactcaactgtgaaaaaaaaaaaaggaaggaaggaaggaaacaccccatggttaaaataggaaagggttggtgcagacatttcatcaaataggatgtgcaggtgacataagcatttaaacaggctcttaacaggatttcccattaagggaatccaaatcaggcccacaatgagaaaccactatacactttttagaatggctgaaattaggaggaaatacaggtaataccaatgctgatgagcataccaagttcctagtgtctacgacattgttaatgggactgcaaaatgaaacagctactctggaagataatttttagttttttctgcaatcaaacatgcccttaacacatgacctaaatatcccactcttgaattttgcttcagagaaatataatcttatattcacacaaaacctctattcaaatattcaagatattgcgtgtgtgtgtgttagaaactaaaaataacataaatatctcaaaatctgaataggtgaaaaaactaggaagcaactataaattgaataccatcagcaataaaaaatatcaaatgatcgattcacaaaccattacaggtggaactccaggcattacgctaagtgagaggaagccagtctcgactatcaaagggacacagctgtaagcagcacggtcatcctcaggtgtcagtggtttgggctgggctttctttgtctctttcctgaccagacccagatgttgagctctgccacttggagatggaaaattctactattttcaaccatgcactgaggtgtgaattacttcacagactgaccaaacaaacatgggctccactgaagagtgtctggcatttgtttcaaccacaagagaacttttcccagctcttccatgtccttggttctctcctgcaagccaggagccctggagtgtagcctgcatctcccatgtatccacccagctccttccaagggtcttccaccacaccctccactgtttgtgagagcactgggaggctttcaatttttccacattctgttgttactgaagttaggatgtttaggacttattaagatcatattttatgactgaatttcattgccccctctctcctgggacagagctcctaaacaaggttctgcaggtgtagacaaagttgagctgttttattcctcagcctaggagctgagcgctcagtggagggtcggagaggagcttcccaccttctcagcacttcggttatggtgggggagaacctctgccataggacagagctaggaaccagagacccaatgttcccagtggcgctggacccaggggagagcctccatccatgagtggggctctatggaaggagtgagtctctggctctcagtagctcttgtccagcactgaacctcagcatcatgtgctgtgggcagggtcagagggccaacgtactgccccctggggaagagtttcctctggtgggagttggtagaaggtgccctgtcttcttggctgcatctgtccgcagtggagtttacatcatgctgagctgggatgtggaaggaaggaagagcaccttagatcaaatacgatgactggccttactgagttttctatattttcttaaataaatatttcttcacttgctttatgctgttagatcctttccaaaccctgtaattttttcaaaataattttcactggtctcatgagggcatggattcattgagcccctcatgctgttaaagagaaatagaactgtttttttttttcactttttagcgaacatccatgggttataaaataattagttgacatttcttccaacactttacagataccatcaactttcctcttgcttgtgaggttttaaccagaagaatgctatcatcatcttttctgttcttttggaaggaatgccccctctactcacctccacttgcctgcatatatttctatttgtctttgcttttcagcagttttaataagatttacctaaatgtgtgtgggggaagcagggggtgttattctgttgttctgtgttctctgagatgcatggattcaccatttactctgcctccattttggggaacacagttagaaaaaatgtcagtgtgagcccagaaacaagcctccctgaagggggaacaggaccacccgggggcgctcaggacccactgagcacaagagccagcctcagggcaggtgcagacgggggttaaggtctggtttcccgtcagccctgtggcttcctctccataaaacagtttcctctggggcacttctctggattccttatcctgttcttcctattcttcctgaagaagaaacatttgtcgtaacaagagaaaaattttctcacatgcaccaaaggcagagtcacctacagtcacttattccggtttctcaatgtgaataaattatcaatgcttctgaatttaatcagctaaacctattaaaggtgcggtgtttaactcaacactgccgccagctcaacagaactccaagggtcagtgagcaggagggaggataaagggcatgctgggcactggggcagagggagttagcatccagtgcaagagaagaaaggccccgtggtggtcactgtcaggacttcaagcccatagttccaattgtaggtgaccacgttcaaaagaagagagacctcatccatgattagtgtgatgtgtcaagtctgatagtgccacactcacacctcaggtgattatgaaaagatttaccaactctactattgtctgctgagagcagcacaggcctctcaagaaattccaaactggaatttcctcaatggaacaggaaaggaggctggcttagggctttataatgatttggtggtggggtcggggggtcatttattctcaggagaaggagcttgtgtgatttaaacctcacattggcatcagatgagggagcttctacgatttctgactagatttcccatatgtgggggacaagggagaagaagaataaaccttaattcatcagcagcaagcaccaaaataggacctgacactttattctccctagcagcttaagaaaatgagtgaaaaagagagatgagggtccactgtgtgtgaaaagcaaacagaaataaagaaaataaaaatttttattatggtaagcacataataaaaagaaagagaagaaggaatgagacagacagtggtgctgaatcaatgtcctgggtggggccttttctattatccactgtcatcagtttattctgaaggtctcaggtcagcttcctgcttcaaactatcacaggcccttatagggtatataaaaatccttataggatatccacagtttgtcatactttactaaagtagtctaataattagatgaagttctgaatttaatattcagttataataaatattaaaaaataccacaatctacaaattaggaaaccgagactatatttttatcaagggttacagccatcccatatgctggaaagcatagttttggtaaagatgagagacagacactcccaagaagaaggagttgggcagaagatttatgctgaactgtttggctaaacagacttagtcaacaggttacagagaggctactgatgttcatggaggtggtgctgacacatgcatactgaacacacatgcatttaacatgtgagtcctgttcaattgccagtggtgacttagcatttaaattcattacagtcaggccctatgtgcaaacagcagaagcagagacacaaaggcactcagggtgcagcctctgtaaacagccagagccaggccatggtcagcggtctctgatcaggagaaaggtcctgatatcaaatgttcaatcaaagctggggttatggcttgtggaacagggggtcagttcagcagggatgggctgcaattgtcttcatagtgcttgtctcagtgccagtgcttactgagccaccagagaaaacgaataacctattggcagttagaacatagtttatcttttaagtgtagaagtgagtggcaaaatcctcgtctagcaaggccttaggtcttgtttataatttgacatcttactgccactgttctgtcagtcttatgatttctattttaacataagtgttggccattgctgcgtctaaaccacaaagggaagaaggtataacgaggcgtgtctgatctcttgtttagacatggttggaaacagtttttggatttttacggggttccctaggccaagagatggactatttaatcagtcgtgggttttagggatttatttttaggttacagtttataaatatgaacccaactattgactttctgcaatttcactgctgtgttgtggttaaaagtacctgataaaattccttccaaagtggttcaagagcaatattctaccctgatgtttcttacaatagatataattccctgctttaatgttattagaggctattgaaaagatgtagggaaatgatggtttaatctgttgatgaatagtgtgggtaaaatgcagtcatcactttcaacactttgtcatgcatgcatgtaataggacagaggtgagcattgtgggtaaatctctaaatgtatgggccttccagctaccaaataataggctaataactgatgtctccctgaggggattaactataaggctctcttgctagggagagaatctttggccaaggaagttcaagattttcttaaggtttggacaattttagtttaaggatgacaattttcttcaacattttcagaagattgtggatgggatggatgctatgttgtatacataatgctaatgccttccatatttagataatattataaacccctgactgataagactgcttgcttggtgtgatgacccactacaatatgtatactttcagttggtatgctatgtcattttccttcaggtttttactttccaagttacattagtcaggtctctaaaatgcaggactgcatctaaaatgtgttattttgttgtgcattttcacatgttccagaaggtgggagaaatttctttgtgtgaagagcatcccaaagtcaggcactcctctagaacacgtgtttaatccttgtctttggcttattgatgagctctgttgactgcaataacttctgccatccgggctgacttgacatcacatagaggaacaaattctgaatgaaagtttgctctactcaattgagtgcataacctcatttcattactgatgtataatgcatcagagataatattagatcaaggatttcaatgggaatctaatctaaaagatgtaaacaaattttcataatttagataaaattactgtgagcacactgctgctattcagccatgtctcctatcacactgaatccacactaactttgacctaaaagttagcatttgttctaatgttcagaattgttatttttatcataacgtctctagatgattacagagtgtggctatgttggccatcagtaaaggaaagctattttaactgaatgaaaatgagacaaagcacacaacctaatgtaatggaagtcaggacatgagtgtctccaggcttttgtgtttcaagagttcatgcaccaggggatttcttttcttacttgtacacagagcaacacccaaaatgttcatttcctctcccatcgactcttatcatctgtttctatgtcagttagctttgaatttttgaccccagctgcattcaagtagctgcaaataagcgtgatttcattcttttttatagctgcatagtattccactgtgtataagaaccacgttttctttatccagtctataacggatggacatttaggttgattccatgtctatggtactgtgaattgcacagtgatacacacgtgagtggatgtgtttttttgttacaataatttgttttcttttgggcatatacccagtaatgggattgctgaggggaattgtaggtctgttctaagttatttgagaaatctctagatcgatttccacagtgctttggccaagttacattttcaccaaaagtatgtaagtggcgcttttctctatagccttgcctgcatctgttaatttctgatcttttagtgatagcaattctgacatgtgttagatagtatgtgattgggttttgatttgcacttatctgatgatttgaggatgctgagtatttttgtatgttagttggccacttctatgtctgtatttgaaaagtttctgtgcacgtcccttccccatttttaatggggttatctgatttatgctgctgatttaagttccatatagattactgacttgcacacacggagaaagccagtattcccaactaaatagaaaaacataatcacttgtaggtatagacatactgaatttggaatggtcatggcttgcatgttggtattgaaatgggacagcaactttggaaaatggtcttcactgaaaatctcatacacaagtgtacctggtgtcaccacttacagtagttgaatggagaatacaactcaagtgcccatcgactgccacagggatgaagacgccgcggtgtgtctgtgtgtctctaacccacagggatgaagacgccgcggcgtgtctatgtgtctataacccacagggatgaagacgccacggtgtgtctgtgtgtctgtaacccacagagatgaagacgccgcggtgtgtctgtgtgtctgtaacccacagagatgaagacgccgcggtgtgtctgtgtgtctctaacccacagggatgaaggcgccgcggtgtgtctgtgtgtctctaacccacagggatgaagatgccgcggtgtgtctgtgtgtctgtaatgcagctttaaagaggagtgaagcactgacataggctgcaacttggatgagccttgaaaacattgggtgactgaactgagggagacacggaagtctacatccctaattgtcccattgacacgaagcacgcagagcaggaaaatcccagatcacaggaggtcaggggaagggaaacacagagtgaccgcttaatggaggtgaggtttccttttctgtgatgaaaatgttcccaaaccaaatagtggaaatggttgcacagcattgtgaatgtgtaaagtatcactgacccatacacttaccaagggctgaaatggtaagttttatgttatgtgtatctcaacacaataaaaatgagtgccacattttgtttagcatatcaatgacaataacagttcaggtgaatgctggattcctcatcacaaccagtgcttcctgatggagctggattcaggggagggactggagtgggttgggtgcacaggtcatgaaggcagcaaaaattccaacccactcctcaagagtccagtcgccacctccagatctatgtccgccggggcagctcttcctatggctgagctacatgagcaacaagcaaataaccatgttttttgttgttgttgtttagttttgttttgctttgtttttagacagagtctcgctgtgtcacccaggctggagtgcagtggtgcgatctcagctcactgcaatctctgcctcctgagttcaagtgattctcctgcctcagcctgccctagtagctgagactacaggcactcactacgacgcccagctaatatttgtatttttagtagagacagggtttcactatgttggccaggctgttcttgaactcttgacttcgtgatccacccgcctcagcctcccaaagtgccgggattacaggcgtgagccaccgcgctcagccacaaccatgtatttttaagcaaaagacacagtgaggggacatcagtgtgagcccagacacaaacctccctatgcgggttcacaggacagcatggggtgctgaggacagaggtgggcactcaggaaccagcagggaaacccagggggcgcttggcacttcatgggggctcaggaccattgtgggctcagtggtcaggcaggctcaaggctcagcctcagggcaggtgcagcaggcggggaaaggccctggagactgggtttagtgtcaccttctcattgcgccactggacaccctccactacatctattctaatgtgtatgagtacttatgagtttagaaaataacattgatattataaatctatagccatatgtgggtgcatcaagttaccctcttcaacctatgtggaccctgttcatcaggaataagtccctgcatttgaggaccttataaatcaataattatgtagaatcactttctttttcagtctcatttcctccctctttctctctctcacacacactgacaaacacgctgggtgctataactttaattacctgatgtgttaaaaaaaattgattcatttggaacttaaccagtttagctgttgttcacgctgttatgtaaaaaagatccctaaatgacttctacctggtaagaggagggaaggcgttggaaggtgaaattgcaggagaaggagagaatcgtgaaacggagtgagttgttttctctatgaatggtgattaggtcaatatttttcaaacggtgaacatattgtgtgaagattatttgtcaatattatctcattaaaactattgcaaataaaagtgtataatttggtaaaaaaaatgaagagagaaataaaaataatacaagaaaagtcatgaactcctgactccacacgtgagttaaccctcagtttttctatgttacttagaaaaacactgagatacagccaaataatatcatgatatctttataagaagagggttttgtaaccctcactcgaaatttctagctctgtcctagagttaatttagggagcagtcagatccagctgtgagaaacacgggccagacagtgagactggcttttaccagatgtgagctcttagacatgtcacatggcccttccgtgcttgggggtttaccttcacatctgtaaatgaaggaaactttgactcccacagaacataattcatgtgcatctataagtagaaatgctaatgagaattaattatttatgaagtataatcactcgcatccactctgggacacagcctactctgaggcatcccttccagaagtcactatatagtaggagacatgcaggtgggtcctccctctgccgatgaaaaccacccagccctgaccctgcagctctgggagaggacccccagccctgagattcccacgtgtttccattcagtgatcagcactgaacacagaggactcgccatggagtttgggctgagctgggttttccttgttgctattttaaaaggtgattcatggatcaatagagatgttgagtgtgagtgaacacgagtgagagaaacagtggatttgtgtggcagtttctgaccaggtgtctctgtgtttgcaggtgtccagtgtgaggtgcagctggtggagtctgggggaggtgtggtacggcctggggggtccctgagactctcctgtgcagcctctggattcacctttgatgattatggcatgagctgggtccgccaagctccagggaaggggctggagtgggtctctggtattaattggaatggtggtagcacaggttatgcagactctgtgaagggccgattcaccatctccagagacaacgccaagaactccctgtatctgcaaatgaacagtctgagagccgaggacacggccttgtatcactgtgcgagagacacagtgaggggaagccagtgagagcccagacacaaacgtccctgcaggaagacaggaggggcctgggctgcagagggcgctcaggacacattaagaacacagtaaactcagggaccaggtgcccagggaggttaagggctggtttcctttcagagacttagctgtttctccatctaacagtttccccagaaccctgcctagatttgtgatctgtatctgctcaaactatctgtgtcaccttcctcacctgtgactttgaggaagcttagtgtggacattccagtgggtggagagatcttggtgacagcaattgtgtgttctgtctaggcatgtctatggctggccatcaggaacgacaggctggaattcttggaaagaggcacacctgccatccatcaggaaattttgttgtcttctgttctgctagaattaaatcaggcacgcccaggttaactactactatcttcctagcttgagaaaattaatggtgggcttgaataacacctatatgaaatcatcagagcaacacctagattcgagtctcatttaataattgagactatgttctagccaaggagacacataaaactggtgattgccgtggtcagttcatatcatatatttgtcagtagaatctggctggtattatgaacagctttgccaacacatgtgttagtgttggtcttcggagaagcacattctatgaatccattaggtttatgtacagtttcctaaggaaccggtccacgcttttgagaggaaacgcagagcgggtggaaagaggctggggaagctgaaggcatatgagggaagttggtccctgagtgaaggagagagggaggataactcagtggaacttccttaaactgtgctgttctaggaaggtccagcaagtcactgtatctgagtcatgtcaaagtttcccatcggggacccccgtgactcccagcagtggctctactcagatcagcgcggagctcattgttctcctgagagtggagcacaggacgtggccccagcaccagccgtggcatgcacatcagagtgcagccccaggcgcatggctcaggtgcactgtgctccctgcaggtggagggagggaagacctgactcagaacccatatgatgtgggttccatacagaacacaacttttacttaatttctgtagatgacatagaaataaacatacagtctgtaaacaatggtgattcctacatttaccttgagagctttattctttgattctgcagaatgtcctggcatggtgttgcctttctcatgtggaagtgtaacataagttgaggacatgtgttccccactttcattgttttcctccatgtacagagatcctgagtggagtacagctgaccctccttccacactgttcctctcctccccacgggaacagcagataattacctgaggctgaatctgaggtgggatatgtcctgtgcacctcagagcctgcagagacccccggctgcagattcatggagtcaggtgtttgtgcatgtgggaatctcgagctgtgctgttgtcagtgaatgctgcttagaactaattgcaggattcagaattaggagaccccctgatctatcacacctcagctcattctgccactcatcatcttcagaaattctgaatatggttcagtttacatttttgtgatgtactgttctcatttcatttagtcatgagtttggtcagcagaaagtgctaccatttatgtgtcccaacctgatgaagctaatttgcttcacgagaagttaggaggctcctgaatcttatcctaagcctgtctctctgcactttcctttaaaattcagttttacctggaattctgttgtgttgatttagccagttttccccatactgagtgtctgattttcctggatatctgatcagtttccttgtccttcaccataacttgggtgacatctgatcaccctggtctaacttcaacaaaaatcctggcaggctgccctaagcaggatttacctcactcctgatgtttcttcttggtgattttccatcctgtgccccaaccctgctgtatgcctataaatcctcacgttctcattctgtatttggagttctgctgaatctctcccccactgcaaaatcccactgccctggtccctacacctatcatgagggccctggatgaagtcttccttactgtgctggaacaagtgtcttcatatatacattttttctttaacaaatcaacctttagtatttcctaattgatcaaaggacctcaaacattgcatgaaagcgaggatctccattttactataaggggtgttgtgtgaatttcagtttccatgtgtggtgtccagaagtcctgggcaccaacggttgtgcttctctgtccaattctgtgattctgaaacccgggagtcatctgaacatgagtaaataggtgacttttctcactatttagtgactgccttatttcatttaccctgaagcttcacgaacacattgatgaaaagtagatagagaacttgtttggaaatgcaagatttatagtagacgtaaccacctacatgattctggaggtcttcttagtgttccaagaaccagatgtttttcccaccacaggacaaagatgagaacctccacgctgtgaggatagaggacaggcagggcaaagatgagaacctccacgctgtgaggatagaggacaggcagggcggtgtgaggacaaaaggggctgtggtcacgtccagggtgttctctcctagcaacgcctccagctctttcctcactctgtggtatttgtcagatgggaaacatacctcaaatttatatttgacatattgatggaagtccaggcaagaggcatctgaaagcttatttctgaacctgcttctgtaaggaatgcccatatcccttggtctctttcctctttcttaactccattggctcccttcccctcctgcacacacccactgacgtttatggccacttccccacacccttcactgtagtaccattttcttgggctcctgggaaacccaacagctttagttaaactcacagctatgtacacccataggcccctcaggaggttctcagtttcactcctacagtctcccaggctgctccttggggtcctaacctgaccatctctaccctctctcctgagtctggccatccattgaacgtccctgctgccctctaatctggatttgtgtacagtagaaggttaactcagcagacctggattgtttaaaccctgcacattcctgaaaaacattgttcatttatggctctcagttacctcctgatgagaactctgagcccttaaaatgctatgccagataacagtgtctgtggttgtctgcagccttgggacctgtagtacacatttaatcatagtgctttgtagtgaatgccagctatttttttttcctgggtagcgggggagctgttgtctgagtattgtggtcagttgaaatgcctaaccttgttttcactctaactcactactttgaatcttccctgtttgtctctttaatcacctagccttgcttctcatgtaagtaagactctctctagctgggaaagctggacaaactccaattgaccccttaatttacaagacactaagggctcctcacccaacccccttccgtaaggagttaacctgtgtaaacagattctcagcatttcaaaggagcccagttaactgataaggtactagcaccaacaatgtatgaagttcccaggatttttctcaaggagataacaacataaagccttgagttcatgcccggcatagcccctatatctaattataatgaaagatttagagccctgcacctggtactgttgctctttttgtaaccatttgtcttttaaattgtttatctctctgtaaccattttgcttcttttgattcttgcatgtttttacttccgtagaattattgcacttgagttcccctccccttcctaaacctaggtatgaaagttaatcaagccccttcctcggggcccagagaattttgagcattagccgtctctttggccgctggcttaataaaggactcttaattcgtctcaaagtgtggcgttttctctaactcgcctgggtacaacatttttggaggccgcagcgagatattaacaccactgggcgagagccggtctcgctccgggctcccccggaaggatggccagctcggaggagggacaccacctgaggaaagaattttcaggtccgcaaagagtgaccgccttccagaggagagcggatcgaccactgtgtcagcgccctaaaagtcaacatctgagtcctcagcttctgaccccggggtcaggtaggtcggatgtgacttcgtttccggtgagaggggagcggccctgacgagggcgctgagtcctcagcttctgaccccggggtcaggtaggtcggatgtgacttcgtttccggtgagaggggagcggccctgacgagggcgctgagtcctcagcttctgaccccggggtcaggtaggtcggatgtgacttcgtttccggtgagaggggagcggccctgacgagggcgctgagtcctcagcttctgaccccggggtcaggtaggtcggatgtgacttcgtttccggtgagaggggagcggccctgacgagggcgtccctcttttgactcagcccattactctaggatgctagtgggttgagccttcgttttccggtaggcgccttcgtatcttggtttgggtgggaagtggtcctgaccaggaccctcccttgacttagctcaagacccaggacgctggagagctaagccttggtttctggcagacctctctctctctcttctatcttccatccttcttttggaaatctccgggaaaggaaaaaaaaaaaaacctgttataaactctgtgtaaatggtgtgtgaatgtgggaggacaaaggcttgcgtttgtcttccagtttgtagctccatggcgaaagctacggagtttgagtgggccctcacctgccgttctgtggtgacctcataaggcttaaggcagcatcgggcatagctcgatccgagctgggggtttatactggcctgccaatgctaagaggaacccaagtcccctcacggggagtggccaggcaggcatctaaatgatcccatcacgggacccccttcccttgtctgtctaatagagaaggtaaaacaggaaaactgtcatcattgtttacatgccctagggtcaattgtttgttttatgtttattgttttgttcggtgtctattgtcttgtttaatagttgtcaaggtgttacatgtcaggacatcgatatagtccacgaggtctgggtaaaaatttcttcaaggtccttagtgctgattttttgtcacaagaggttaaatttctaatcaatcatttagactggccaccacagtcttgtcttttctgtcataaacaagtaagctgttgttacggaaaagagtgtggagaacattcacctgattggaatttctggcaccatgaaggttgcgggtatttagattgtcataccccacgtcctagtgattggtccccttctaaactgaactggtggtgggttcaaaacagccaccctgcagaccttcttgctcacctcttctgtcattctgtaacttttcctgcgcccttaaataggaccttgtgtaaagaaacctacgcccgtcatgctttacttcgtttagactcctattctgttccactgtggctactttctcatcttaaggacgatccgagtggtccttttccccctcgtccctgccccttaccccgcacatctcgttttccagtgcaacagcaagttcagcgtctccaagacttcgctctgctctcactccttgaacccttaaaggaaaaagctgaatttgaactgtttgcctttgaatcgtggagacataaaaaacacttaggatataggtctagaagaagaagaagagggagaacgcctagatcgaactggcccaggagacctcagactggccaccaatccccctccctcaatcttaaagctacagcaatgtggcaagtggtattagctgttgtggtttttctgttctttctgatcatgttaattctgtttttccgacactccagccccccagggaaagagtttctctgccggtgttggatctgatatctctgctcaagactttgctaaattgtctttaaataataataataataataaacgggaaacacctcctcctggccccgtaagggttggagccctctccagtgtatgctggaaaatttttctcttggtttctcagaggactatggagtccgccttagaaaaggcaaggtctggacactctgtgaactagaatgaccaaagtttggagtcggatggccctgtgaagggtcattaaatcctaccattgttcaagccgtgtgatgggttgttaccggaactcccggccaccctgatcagtttccctatatcgatcaatggctaagtttgattaggaatcctcctccatggctctgttcatgtgccattcgcaattccacctccaaagtcctcctgagccaggccgcgtttttgcctcaaccctccgccagttcggctccccctgttttgcctccctctgaagaagaggagagtcttcctcacccagttccaccgccttaccaccagcctgctcccttggcgccatcccgtgtctcttcgactgcgtcccctgtgggctgtgaccgcccattgccttccgctacgaccgcatgggaggaagcagcccctctactcccactgagagaggcacgagtcccgcggctgatgagcgctcagcccccttcctggtttatgtccctttttctacttctgacttgtataattggaaaacccataatcctcccttctctgaaaagcctcaggctttgacctcactgatggagtccgtgctccggacccatcgacccacctgggatgactgccaacagctccttttaactctgtttacctctgaggagagggagcatatccgaagagaggccagaaagcacttccttgcatcagccggtgggccggaggaggaagactagagacctcctggaggaggaggaagctagagacctcctggaggaggaggaggtctttccctccacctggcctaattggggcccagattcctcaggtggaaggagggctttggacgattttcaccagtatctcctcgcgggtattaaaggagccgcttggaagcccataaacttgtctgagacaactgaagttgtccgggggcctgatgagtcaccaggggtgtttttagaacctctccaggaggcttatcgaattcacacaccttttgacctggcgactcccgagaatagccgtgctcttaatttggcatttgtggctcaggcagccccagatattaggagaaaactccaaaaactggaaggatttactgggatgaatatcagtcagcttttagaaatagcccagaaggtttttgaaaaccgagaatttgaaaaacaaaaacaagcgacacaggcagctgaaaaagctgccgataaagcatataaaagacaagcaaaaatcttggtaacagctatccaagagggcagaaaggaaaggcctgcattccagaaaaatggccaaggaacctcgggttcccaccagaaaagtgaaagaggtgaacaggcccctctaggaaaacaccaatgtgcctattgcaaacagactgggcattggaaaaaggagtgcccgttactgccaaaagaaaaatctgaaaacaaaaaggttctcaccctggccgcaacagaggagcctgatgattgatggggacagggctcccttgctctcggcccccaggagcccatggtaactgctacagtggggggccagcctgtatgtttcctaggagacaccgggggagagcactccgcactggagactcccctggggagtgtctcaaataaaaaaattgctgtacaaggggtaactggagctatacaagaatatcctgtcacacacacctgagaagtaatcttgggacagaaaagagtgacacactctttcctagtagttccagagtgtcctattcctctccttggacgggacctactccataagttacaggcctcaatctccttttcagctcagcaggctcatctcacactaggaaatgcaacttcccccactgcccaactcttgctaactacccctctgtcagaagaataccttctggtttcaccgtcgtaatcaccggaggagaatactaatactcttttgttagatctacagacacttttcccccgagtttcggccgagtcaaaccctcccggactggctaaacaccatccgccagtagtcatagaactcttggccactgccataccggtccaggcaaagcaataccccacaagtcagcaggctagagaggggattaatccccacattcaacgactgttacaagctggcatacttaccccatgccagtcggcctggaacacgccatttttgccggtccagaaacctggaacaaatgattactggccagtacaagacttaagggacgttaataaatggactgttgctgtccacccaaccattcctaatccctatactctactcagcctgctcccaccagaacatacagtatacactgtccttgacctgaaagatgctttctttgctatccctctggcccccaaaatccagccgatttttgctttcaaatggacagatccaagatcaggagacactacccaactgacttggactcagttacctcagggttttaaaaattcccctaccctttttggagaggctcttcagcaagatcttataccttccgagccagtcaccttaactgtactcttctccaatatgtagatgacattttaataacaactgaaactatggatggttgtctacaacacacaagagacctgctctacctccttcaggagctcgggtatggagtctcagccaaaaaggcccagctttgtcttcccagagtgtcctacctggggtacaagataaacaaaggaaaaagggcactcactagtgcccggaaagaagccatcctgcgaatccccactcccgccaccaagagacaggtacatgaattcctaggagccctgggatattgtcgtctttggatatcggggtttgcagagattacaaagcctttgtatactgctacaaaaggtaatggcccactgatttggacagacaccgaggaacaggcttttcagaatctgaaaaaggctttaactgcagcccaggctttagccctcccaaatatctcaaagccttttcatctgtttgtccatgagagccagggagttgctaagagagtgcttactcagactttaggaacttggagaggcccagtggcttatttatctaagaaggtggatcctgtggcctcaggatggccaagttgtttggcagccatagtggctacagcaagcctagtccaagaaactgataaattaactctaggccagaatttaacccttacagttcctcatgctgtagagacttgactacgaagtgcttcaggtaaatggatgtcaaatgctcgtattttacaatatcagagtttactgttggatcagccttgtttgactttctctcccacaaggtgtttaaatcctgctactttactcccagatccagattctaatactcctgtccatgactgtcaggagctgttagaagctaccgaaactggcaggccagatcttcaagatgtgctcctgagaaaggcggacgccaccgtgttcaccgacggcagcagttttctcgaacaggggatacgcaaagctggtgcagctgttaccacagagacagatgtgttgtgggttcaggctttaccggcaagcacctcagcacaaaaagctgaattgattgcccttactcaagctctccgatgggttaaagataaacgtattaacatttatactgacagcaggtatgctttcgctactgtgcatgtacatggagccatctactaagaacgcgggttgctcaggtcagaaggaaaaataattaagaacaaagaggaaattttagccctgcttgaagctgtgtggctccctcaacaagtggctgtaatccattgtaaaggacatcaaaaagaaaacacggctgttgcccgcggtaacccaaaagcggtttcagcagctcgggaagtggcgctgtcttcagctccgtccataaacctgctaccggcagtttcttttccacagccagatctgcctgacaaccccgcgtactcaacagaagaagaaaaactggctgcaaaccttagagcaaataaaaatcaaaaaggttggtggattcttcctgactctagaatcttcgtacccccagctcttggagaaactttagtcagtcacctacattctaccacccatttggtgggacaaaattagctcagctcctccggagctgttttaagatccctcatctacaaagcctaacagatcaagcagttctctggtgcacagcctgcgcccaggtaaatgccaagcaaggtcctaaacccagcccaggtcaccgtctccgaagaaactcgccaggagaaaagtgggaaattgactttacagaggtaaagccacaccgggctgtgtacaagtaccttttagtatcagtagacaccttctccggatggactgaggcatttgctaccaagaacgagacagctaacacagtagttaagttcttactcaatgaaatcatcccctggtacgggttgcctgctgccatagggtctgataatggacctgccttcacctcgtccatagctcaatcagtcagtaaggcattaaacattcagtggaagctccattgtgcctatcaaccccagagctctggacaggtggaatgcatgaaccataccctaaaaaatactcttaccaaattaattctagacaccagtgaaaattgggtaaaactccttcctttagccctacttagagtaaggtgcaccccttatcaggctgggttctcaccttttgaaattatatatgggcgggcaccacctatcttgcctaagctaaaagatgcccattttgcagaaatatcacaagctaatttattacagtacctgcagtctctccaacaggtacaagagatcattctgccacttgtttgagaagcccatcccagtccagttcctgaccagatggggccctgccattcattccagctcagtgacctggtgtttgttaaaaagttccagagagagggcctaactcctgcttggaagggacctcacaccgtcatcctcacgacgccaacagctctgaaggtggacggaattcctgcttggattcatcactcccacatcaaaaaggccaacaaagcccaaacagaaacatgggtccccaagcctggatcaggacccttaaaactacacctaagtcgggtgaaactgttaaattaactctttttatttgcttcttttgtttatccttgcctgtaatgtcttctgtgccttcctactccttccccctcacctctctcacaacaggacgtgttttcgccaatactacttggaaggtggtactccagggcaagtcacctttgcagtcgacttgtgtatactgttcccggagccggctggtacccacgaagatcatcgcgacctgccagtcatgggagcaggaggtgtcgaccttgcagcaggatttggacactctgggagccaagccagatgtggaagctccaaaggtgctgaaaaaggactccaaaaggttgacttttacctctgtcctgaaaatcaccctgatgctagctgttgagatacctaccagttcgtccgcccggattgggcatgtgtaactttagccacttactctgggggatcaactagatctccaactctgtcaataagtcgtgcttctcgtcccaaatcgtgttctaaaaataattgtaaccctcttaacatcattgtccatgaacctaattcagctcaatggtactatggtatgtcatggggattaagactttatgtcccagggttcgatgttggaactatgttcaccatccaaaagaaaattttggtcccctggagcccacccaagccaatcggacctttaactgatctaggtgaccctatgttccaaaatcaccctgacaaagttaatttaactgtgcccccaccattctcagttcctaagacccagctacaaagacatcaactccaacccagtctgatgtctatacttggtggagtacatcattttcttaacctcagccagcctacactagcccaagattgttggctatgtttaaaagcaaaacccccatattatataggattaggagtagaagtcgcacttaaaggtagtcctttatcctgtcatgcacaacctcatgctttcacattaggagatgtgtctggaagtgcttcttgtctaattagtactggatatgacttatctatttctccttttcaggctatctgtaatcagtctctgcttactcccatgagcatctcagtctcttaccaagcacctaacaatacctggttggcctgcacctcaggtctcactcgctgccttaatggaactaaatcagaacccctcttgtgtgttctagttcatgtccttccccaggtatacgagtacagtggatcagaaggacaactcctcattgctcccccggaattacatcccaggctacgcagagctgccccactactggtttctcttttagccggtcttagcatagctgggtcagcagctattagtacagctgccctagttcgaggagaaactggactaatgtctttgtcccaacaggtagatgctgatttaaataatcttcagtctgccatagatatactacattcccaggtagagtctctagctgaagtagtacttcaaaactgccgaggcttagatctgctgttcctctctcaaggaggattatgcgcagctctaggagaaagctgttgcttttacgccaatcaatctggagtcataaaagatacactccaaaaagttcaaaaaaatctagataggagccaacaagaacgagaaaataacacagcctggtatcaaagcatgttcaattggaacccctggttaactactttaatcactggtttagctggacccatcatcatcatattattgagtttaatttttggcccttgtatattaaattggttccttgattttgtaaaacaacgtattgcgtctgtcaaacttatgtatctaagaactcaatataacccccttgttgtaactgaagaatcaacgacttgattcccctaaaacacaagtggggaaatgaaatgcctaacggtgtttttactttaactcgttactttgaattttgtcctgcttgtctctttaatcacctaaccttgcttctcatgtaaataagactctctctagctaggaaagccagacaaactccaattgaccccttagtttacaagacactaagggctcctcacccaaccccctttcgtgaggagttggcctgggtaaacagatcctcagcatttcaaaggagcccaattaactgataaggtacccacaccaacaatgtatgaagttcccaggaattttctccaagagataacaacatgaaaccttgagtttgtgtccggcatagaccctatatctaattataataaaagatttagaaccttgcacctggtaccgttgctcttcttgtaaccatttgtcttttaagttgtttatcactctgtaactattttgattattttgattcttgcatgtttttacttctgtaaaattattacatttgagtccctctccccttcctaaacctaggtataaaatttactcgagccccttcctcgtggccgagagaattttgagcatgagctgtctctttggcagccggcttaataaaggactcttaattcgtctcaaagtgtggcgttttcttaactcacctgggtacaacagtgcagctggtggagtctgggggaggcttggtagagcctggggggtccctgagactctcctgtgcagcctctggattcaccttcagtaacagtgacatgaactgggtccgccaggctccaggaaaggggctggagtgggtatcgggtgttagttggaatggcagtaggacgcactatgcagactctgtgaagggccgattcatcatctccagagacaattccaggaacttcctgtatcagcaaatgaacagcctgaggcccgaggacatggctgtgtattactgtgtgagaaacactgtgagaggacggaagtgtgagcccagacacaaacctcctgcaggaacgttgggggaaatcagctgcagggggcgctcaagacccactcatcagagtcaaccccagagcaggtgcacatggaggctggggtttgtttcctgtcaggatttgggacttcctctgcttctgacagtttctctagggaaactctttaattttagatttctgtgcccaccaatgtcatctctacatttttttaatcattgtaatatgataggaggacttattctcacatgcacaatatgtatattgccacctacgggaatgaaaactcctcaaccatggtcaccagcatcagagtcgtgaggaagctcaggggtgcctggtgagtcttctccagtcagactcaggacagtaacctcaaggggattcccttgtgagaactcacacactttcatgagaacagcaccaggagttggttctaaaccattcatgaaagacccactccatgacccagtcacctcccaccaggtcaccccttcacaattgaggattataatacaacatgagatttggggcaggacacaaatccaaaccatatcagatacacattgtgaaatgctcatgatggtcagggtaatttgtatttctatcacctcacagcgctaccattttattatttttttaaattaaatgcatgagtgagtgtctgatgagaacacctcagatataccctttcagcaacaatcatttttataatacagtattaactataggaccattgctgtacgttagatctccagaactcatccaacctgcacaactgaaactgtacaatttaacaaacatcacccgatttccctctcctcccaggtcctgagaccctctattctgctctctactttcaagagcttgaatattttagatcccacatgtaaatgagatcatgcagcatttgtctttctgcatctggcttattccactcagcatcatgtcctccaggcccatccgtgttgttgcaaatgtcagaatttccctcttttcaaagccaaataaaatacagatttatgtatacacattttctttatacattcatccatttacagtcattaaattattttgcaaatctacactattattaataatcttcaatgaacacgtctttggcaaagtaattttatttcctttgcatatataataagaaatgggatcaccagattatatgatagctttattttcaacttatcgagtaaccaatcctaccacagtgtattccctttccctcacattcttgccaatatttgtcatctattacatttctgataataaccatattaactagtgtgaggtgatatcgcattgtgcttttcatttgaattcctctgataattaggaatgttgagaaccttttcgttttctgtttgccatgcatgtatcttctgaaaaaagttatccaggtttttgcccttttttatcagttcatttgttatttgctattgaggtatatgggttatttatacatttagatagaccttcttgtcggatacataattacacatagtttttcctgtgctttgttgttaaattcaaagaaatcagttccgaattaatggcaggaattttttttgctccatgtgatttatgagtttatggcttcaggtattatgtccaatattagctgatttttttatatggagttagagaaggcctaattttatttcttttgaatatgaatgccagttttacaccattattgaaaagactgtcctttctctactgtgtgctcttggcacacaaaatcaggagagacataatgacaaaagaaaatatcagatgaatattcctgatgaacatagacctgaaagtcctcaacaaaatactatcaaatagaatccagaagcactttaaaatgtaatacatcatggtcaagtgggctttacccctgggatgcaaggctcgttcaatatccacagtaactgtgattcacaatgtaaacagaataaaagcaaaaaccatatgattatgtcaatagatactgagaaagcctctggtaggttctaacatccactcatgataaaaaccctcaacagactagacatcaaagaaacgtacctcagaataatagccatctacagcaaacccacagtcaacaccatactaaatgagccaattaaaacacttgtctttataaattacccagtctgaggagtttctttatagtgtgagaattgactaatacagcatccaaataggaaaggaagtcaatccgtccaccttcagcgatgatataattctatacctagaaaatcctaaaaagtctgccaaaataattctagaataaacaactttagtaaagtgtcaggatacaaaatcaatggacaaaaattaccagcatttctataagccaaccacatccaagctgagagtataatcaagaacaaaatcctatccaacttacagtatccacagagaaaatgaaatgcctgggaacacagataacaaacaaggtgaaagatcactacgaggagaactataaagcacagcagaaataaataataaatgatacaaataaatgggaaacatttcatgctcatggattggaagaatcaatattgtaaacattgtcataatgcccaaaggaattcacagattcaatgctatttacataaaactatcatcatcattcttcacagaatcagaaaaaaatctattctaaaatttatatggaaccaaaaaagaccctgaatagcagaagcaatcctaagcaaaaagaacaatgccagaggcatcatgatactgaccttaaactacaccataatgtcttgctaacaaaagcagcttggactggtacgatagcagacctgcagaaaaaaaaaaatagatcaaaattgaaaacagaaataaagttgcacacctgcaaccttttgatctttgacaaggctgacaaaagcaattggaaaaaaaaaatctctgtattcagtaaatggttctgggataactggattctggcaggtcttgcagaatgcaagagtgaaggagcctgtccagcttctacctagatttcagatgttagagagccctgcatgcccaggaagaagcctgctgcagcagtggatccaccacacaaagcctctactagagcattgccaaagatggggaaagatggagttggagcccccattcagagtccccactaggacgcttcatagtaaagctgtgggaatgtggccacaaccctcaagaccctagaatggtagagctacaggcaacttgcaccctcagcctagaaaagcttccagcacttgactctcacttgtgaaggcagccccgtggtctgtgcctagcaaacctatagggattggctgcctgaggttttggggacccaccccttgttccagtgtgccctggttgaagtacataaagtcaagagagattattttgtagtgttaggatttaatatctgcagtgctgggttttatatgtgtgtgaggcctgttggttgttccactggccaatttatccctttaggattggaattatttacccaatgcctgcaccatcattgcaccttggaagtaaacaactttcatttttaaacttgcaagctcacagctggagggacattgccttaagactcagatgagactttggacattttagttggaggttgatcaacttaacattttgggaactattgaaaaaaggtgattatattttgcagtgtaagaagaatatgagaactttgggtctgagagtgcaatgatatcatttaggggttttcccctccaaatgtcatggtgaaatgtgacccacaatgttggaggtggggccaactgggtggttttgggtcatgaggagatttttcaggactggcttggcatccaccccatggtaattagtgaattcttgctgtattagctactgtgagattttattgttcaaaaaagtctggcaaccctcctaccctctcatgtcccccctcctcaccatatgacacagcctcctccccctttgccttccaccatgactgtaagcttcctgaggccctcgcaagaagcagatgcttgtgccatgcttctcacacagcctgcagatctgtaagccaaataagcctcttgtctttgtaaatcacttggcctcaggtattaatctataccaatgtaaaatagactaatacactgcccaaagcaatatacagagtccatgcaatttatatcaagtaactaatataattgattacatatttttaaaaatcctaaaattcatatagaaccaaaaaagggtctgaaaagcaaaagcaatcttgagcaaaaagaacaaagctggaagtaccgcattccctgacttcaaattacacaacacaaagataacaagaaaggcagcgtggtaatggtagaaaaaaaatcaagagcccagacatacagccaaatatctacaaccaacggttctttgacaaaactgacaaaaatatacactggagaaacaaccctctattcaataagtagtgctgggagaattagatagccttatgcagaagaataaaatgagacttctgtatcatcatagacacaaattaactgtgaatatggattcaatgtttaaatttataaactcataaaaattcctgaagaaaatctaaaaaaaatcctctagacatttgcctaagcaaataaaatatgactaagactgacttcaaaagcaaatgcaatgaaaacaaaattagacaaacaggattaattgaaacacagattgtctgcatagcaaaagaaataaccaacatggtgaacagacaacctgtgaacagtaaaaaaaaatttgcaatctattcatcaaagggctaatacatagaatctacaaggaactcaaataagtcaacaagaaataacaaataacttcattaaagagtgagcaaaaaccagacatttctcaaaagaagacacagacgtggccaaaacaaataaaacatactcagcatcaccaatcatctgataaatgtaaattacaaacaacatgatatagcatcttccaccagtcacaatggctgttattacaaataaaaaacagcaggtgtttggagagaagcataggaaaaataatgctttttatatgcttggtgaaaatataaattagtacaacctctatgaaaaacaatacagaagtttctcaaagaactaatattagaattaccgtttgtcccagtaatccctcccagtgggtatattcctcccaaaaggaaatttttatatcagaaaaagtcacctgcattcctagtgtctttcacagcaacgtgaatagagttgtaggacattagcctaaataaaataactcaaaaagatcttctcttttataattggaaagtaaacaatgggtacacatgtacatacataaaaaacaaaagacactgggaactgcaaaagagggcaaggtgagaggaatgtgagggttaaaaaatcacctactggctccaatgttcactagtgggcgatagttacaccagaagcccaaacctcacctttatgaaatatattcatgttacaaaattgcacatgtacaccctgattctactgaaaaaaacagaaataaaacatgaacagaattgttagactgctagctagatttgtcaacaaagaaaaatgcaaaaggagcaattctctgttttggaaccctttctcattttctggtacaattagaaattgtagactaatccctatattctcttctgaagccctagcattagccatttctcaaagacatgctggttccttttttttttttttttttttttgagacagggtccagactcactgcaacttccacctcctgggttcaagcgattctcctgtctcagcctcccaagtagctgggattacaggcatgcgccactgtgcctggctaatttttgtatttttagtagagacagggtttcgctatgtgggccaggctggtccaaactcctgacctcaaaagatctgcccacctcagcctcctaaagtgctggaattacaggtgttagccactgcacctggtcactggtttcttttatagaagaatagtattaaaaactcaaatcttgattctgggtgtattttttattaatgtgcactcatttcttgtagaaattctcaggtaaaaaatctaggaagtatgtgttgtgtattaacccatatatacacagacatctaaactatttttatctaatatatgtacctatattatgctaaacttgcaaataaaatgacatgtccaccctaagttaataccacatggatgtttatcgcattccttctatgcctgacactaacctcccactccaaccacaaggaaccccatttccccatacgccgtccattctctttgtagtccaattccaagattcctgtggagtgtaacaagatgtgtaagttgtgctcttttgtggaacatcgtcaattggggtacaatgctgatgtgaagtttcttttttctttaatcttattgcctacaccatttctgaatctacttagtacctcttttgaattcatacatttgtaatggaattagacattttctatgttatctgcattccatcctggaattcctaatcacctatttttaaaaaaaattcttttgaagtaagattgtattagtcagggttccctagaggggcagaacaaacaggatatatatacgcacacaggatacacacacacacacacacacacacacacacacacacacacagagtttattaaggagtattaactcgtatgatcacaaggtcccacaataggccatttgcaagccgaggagcatggaagccagtccgagtcccaaagctgaagaacttggagtcccatgttcgagacaaggaagcatccagcacgggagaaagatgtaggctggaaggctaagccagtctaatcgtttcatgttcttctgttgttgttgtttttttttccctctggccacactggcagctaatgagattgtaccacccagattaagagtgtgtctccctttttgagcccactggctcaaaagttaatctcctttggcaacaccctcacagacccacccgggatcaatactttgcacccttcaatctaatcaagttgacactcagtatttagcattacaagtccaccccgtcaacttgaaaccatacacatctcctgagattatacataatcttcaaacaaagacaataataaagtcataattacacctaatataatacaactttattcgttcaactggaaatgcaccaatccccaatccaaatgctattacatatggtccactccctcaaggacacagccaggatcatcctatgacttggtgtctagaagactcatgcacttttaattttacctccaatattagactccactttatcacatgcagacactgcagaatattttaagacatcgatgtcttatgctgaaaaattcaacagtacataaaattgccttcccaccacagccagtggttactactgaataaggatctgccatcccctagggaggtgctatagtggatggtgtgcactgttagtagctatggaaattgatccattgtggcaaatggcagcatctttcttttataacattaaaccatattatattgtatacacataccacattgtctttattcatttgtctgtatgctgaccatcagatagtttccatatcttcgctgttattaacagtgtttcaataaacataggatgcagatatgtttacaaggtggtaatttcatctacttgggtatactcccagaaacaggatttctggtcatataatatctccagttttaattaatttaggacgctttatgttgctttccataattgtggaaatgtagaatggtatagccattatgaaaaacaattttggttttgagttatgatccataaacagcatttgcttatggctctcaatgagagtttctactaaatatgatggaaggccaggaaggattctcaccttaaagcttggatggattatgaatttacctcttatttcctaaaagcaaaagtttggaagcatacatgatggaggctgttggcaggtttcaggatgatctcataaaaggagaatctgctggataaaaatgttgggttttcagttatagacacacctacactcaatatgaaatgatgaagtcaactgaggatctagaacatgttcacttgaagcaacagcacattctcaaaggaacttattgctccatcacaagggcgatgaacttctgaaaccagtaaagtgtgagtgcacagtaagtgataacgttatcacgtttacatgaagtttgtttaatgtgccaaaggctggtacagattaatcttacacaaatatatgaaacatatttttccatacatagatatctagaggataatcctcttagcaaaacttcttcaggttacagaaatctgtgtaagttgtagatctcatggggaactgtctctttataaatactggtctgtttttcaagtcaggaaaaattatctctgttggagtaggcttccaattgtgtagacttctgaattgcttcttgagttgtaacaaatgaaccaaaaaatttgactaattggagttttgtggctgtcttaataaaaatttcttataagctttctttcaattatttgagaccagttttcctgattttatttttctccaatagataaattttcacaagatctcaggaaaccacctctctggctctttagtttaaaagactagcttcttaggaaaagaagcttctttctaacattgaagagctcatttattctgcaaaccatgaagtttgagtctcattgtcaagaatcatgaaaatttttactccaatatactgaaagtcatgactcttgaattcaatatttattggcattcacaaaagtgattcattctcagatgtgtcctatgttgctggcccaacatatcagtgaactgagtatcctcccttagctctctctgtctgtagcactgagtctacaatcttcagagtcatccatgaaggggagtcctgaggttcatgggattcttgtaaacattcaggtcaacagaagaaataagcaggattgagggctgccagccatttccacgccattaggaataattaccatctaagtataaaggtctacatcatacagaataccccacaggataggctgatgcaaaaaattccaaccccacagaggctccacagcaacccttacagttctttcagggaaggaataatctccaagttaaatgagtcagtaaagctgctctgagctacaggaaaaattggatttggccaggtttgtctgagttcaacgtgattattatactcagctcctgctccaatctggactgagtacggggaatttaaatgagcctggctgtgtggtttgttatatgaaaatctgaactatataaacataaatggcatgtctggactagcatgagggtgagagatcctgggaactccaccccccatactcttatcgccctttcctccaggaacctccaggttctcagggtgagaatccacatagatcccttcatggctctatttctaggaaaccaaatctctaataaatacacccagactttcttcagacacagaaaccatgggaaaggcatctctagatcctcatctatgtggggaaaggtaatccatccccattacaagcccatactagcaggcttcctttatcatgaaaatgggtaaaattagccaatagatgtaaatttaaagaaaatttcctgtgatgctccagccagaaaagagcaaaaatcagcttcacttctggagacttcccgtataggtcacagcccagagaaagaagatcaccacagcattaaaattcagctgtaagaacatgtaatgcttccgtgttccacacattatgtctcaccagtttagtcaatatggattaaatacgagagtgtggcaatgcacaaactctatctgaggaggaaataggagaaaaatgttaaggaaaatagaagaattcgacgcctctaataccaggaacttcagcacaaagaaaatgatttcacccttattggcctcaaatttatttttcctgtggcatctgcagggttccaaagtgagaaaaattaattcactgtgcatgcacttccgaagtgtccacttgcattctgatatctttacttctatttgcagaaagtagacacatattcagccttagtgccagtgtagggagtgctttccgtgacatggataccagaaaaatagggtaaacatagggcccattaatgtgaaaatcagacattgtgtgtgtgtgtttgtgtgtgtgtgcgtgtgagttgaatagtagagttggagtgggcttctatccacctacacctgcaggtattctcaggtgccataatcaactgcaggaccctaaaggaaataagagtccccccaaacccctgaagagtttttgggttcaccgtgtgtccaatgattcagtgcctcttgagctctaggaaagggctccccagtgatgcatgagatctttcttggggtctccctgcagagttcactgggattcctaaggccaattcagtatttcaaaagatggtgtgagaagcacaggctgtcactaaaggagaattctgagccagggcacagccactttatacttggctggggacactggtaggaatatactctgtgagatcagacaggaacctccttgcaggggcagggcagggctgcagggggcgctcaggacacacagagcacaggcttccgccccagagcaggtgaaggaggctggggaggggttcctctcagggcctgggacttcctttaaaaaatctaaaataagtatttcacaaggactgccgatgtttatataaatatcctattcaattgtgagcatttatgaaactcgatgttgtaatgagaaccacttttacaattggaatttcaaacttccctagacatcttaatagtaagcagctggaggtcaggaggagatcctttcttataaataagtgcaattttgggagaaacacactcattcccaaaatagcacattcacatattaaggtctagaaatgattcgagttgcccctgagacagtcaaatgtgggttctaagtgaggtgcgtgtcctgggggagcttgttctccagtgggggaagctctgtcaacacagagttcagggatgggtaggggatgcgtggcctctaacaggattacggcttgaaccctcagcttctacaattgtgtcgtccatgtgtcatgtatttgctctttctcatcctgggtcaggaattgggctattaaatagcatccttcatgaatatgcaaataactgaggtgaatatagatatctgtgtgccctgagagcatcacccaaaaaccacacccctccttgggagaatcccctagatcacagctcctcaccatggactggacctggagcatccttttcttggtggcagcagcaacaggtaacggactccccagtcccagggctgagagagaaaccaggccagtcatgtgagacttcacccactcctgtgtcctctccacaggtgcccactcccaggttcagctggtgcagtctggagctgaggtgaagaagcctggggcctcagtgaaggtctcctgcaaggcttctggttacacctttaccagctatggtatcagctgggtgcgacaggcccctggacaagggcttgagtggatgggatggatcagcgcttacaatggtaacacaaactatgcacagaagctccagggcagagtcaccatgaccacagacacatccacgagcacagcctacatggagctgaggagcctgagatctgacgacacggccgtgtattactgtgcgagagacacagtgtgaaaacccacatcctgagggtttcagaaaccccagggaggaggcagctgcactgaatttgaggagattacagggcttacaatgtttaaagttgtttagaaaatgagctgagcaattgaggaatgtgagtaatggaaacatggatgcactctatataggaaatgtttctttcaacagtcaccctatatgcaaaattcagaatggtaaaggcagcaatcagtgaggctgacgcaaatattcccatggaggccttgtgcagacataccgtttttaaaatcagatagataaataatttggaacaagattgctggtaacgtggctaagactaaatatgattcctaaaaactggccaaaatctattccaaattgtctctgccactccttttacataaatgtattaaaaagtagttttaagaccacagcaaaattggacagaaggtgcagagagttctcatgtgcccctgcttcaccatgcacaggctttcccactgtcaccatcctgccccagagtcatcaataagttacaatggatgaacttacatgggcggattggttctttcctcttctggtggtctcttggcataccaagcccaaattatcttgaagcaccataggttctactgtaatgcctaaccttgttttttactctagtttgctactttaaattttccctttttttgtctccttaattgccagccatgtttcccatatgaatagactctccctggctgggaaagctgggcaaactccatttgaccttttgatttataagacattaagggctccttacccaaccctcttcttcaaggaattaacctgtgtaagcagatcctcagcatttcaaaggagcccaattaactgataaggtactggaacaaacaatgtatgaagttcccaggatttttctcaaagagataacaacataaagccttgagttcatgcccagcatagcatcatatctaactataatgaaggatttagagccctgcacctggtaacgttgctttttgtaaccatttgtcttttaaattgtttatctctctgtaaccatttgcttcttttgattcttgcatgtttttacttctgtagaattattgtatttgagttcccctccccttcctaaaccaagatataaaagttaatcaagccccttcctcggggccgagagaattttgagcgttagccatctcttcggcagccggcttaaataaaggactcttaatttgtctcaaagtgtggcgttttctctaactcgtttgggtataacactacaagtgggttcctgggaatgatgccagttcagaggaaaagtgggtggggctattcatatttgggctcttttttagaagattcataaaacagatattttcctatacgttctgtgactcctgatttactatcccttcccagagggtaaggtccctaagtgttttgcggtatatccatgtctatggaaagaaagcaagttctggtgaatcccgtaaggaatgtcctttgatgagaagtggagaccttggtcatgaggcacatcatgtatgattttctataattccgttagattcactgtaattttggggggtgtcctgtggaatgggtcttctgtgtccctgcatgttcagctatatctgtgtggtgccacttacacttaatgagatgagattcctgctgcttgtatcaggtcactggtgatctctgaagctgcttctggtttctgctttaatatgtaaagagcatgtcaaacatcacccacattcttacaataataaaagcctggaaaattgattatcaataatttcttgaatctgttgaagaaatgaaattgcagggaaaaccaggacccccaaaactagaaagacattaaaatagagataatcagactgatggatcaaagttctgtggcaataagataccaaattataaacaaggcctaaagtcatggattaagtcactcacccctacacttaaaaaaatgactgtactgtaacttccacagggcttttttgttttctgtagcacctaaacaagcactggttctgaggtaagcatattaaaacatttgcagctcatggaactccaaacgtggtaactgaccctctcccacaagccataaatagagctttgtttggacaagagacagatttcagtaactgtcttctgagaagagactactgaccatgaacttgtcctggcaatttacagagactgtgcagtgtgtgtctttctgcctctgcacaaagcccttttgatgaacagggcccgattgtcattcatttagttcttaagtcctcatccccaaagcaaacactaaatgcatgtaacatgtgtgtttgcttattagacatgagagcctgcccactatgtgaacatcaacaagatccttctatagcctgctgagtgtgtacacttggccaatccatttgcatgaattcatttctcctctttccctctcttgaagtgcctgctcactgtctctgtgggaggctttgcttcccagcctgttaaggtggctgtcctgcagctttaaccatttctcagaagtaaagtctcctttctaaatttataaattatgtgactgttccgttgaaagtgcaagctggtgggaacagttacatggtaattcggtaaattgctggtggacaggtgtggacagggatagggtaagaactcctgggggctgcacaccccacacttcgatggaatttccctccagaaacttctgggttctcaggatgataatccaaacagattccttcatggctctgtcatcaggagagctactctcttgataaatatgctcagaacttcctccagacaagatcctacagagaaaaaatgcttttcaagatcctctattctatgtgaggggaaggtattcttttccatcccaggcagtttcatcttagccttcctgtgtcataaaaaggtcaggttcaagacaataatatgtggatgctgcagccaggaggggggagtagaagacggaggaaaatcagctgcaccactggagactccttgtaaagggcacagtctagagaaaaaacatcaagaaaacattgaaatcaatttccagtacatatactgctcccctgcccaccacatcacctcttcaccagtatgatcaatctggattaaagagaaaagtgtggcaatgcacagactctgtccaaggactagaccttagggaaaccaaaggcagagggagaggaaaagttaaggacagtgaagcggtttaaagcctctgagaccaacagcttcaggaccaaggccacggcccctctgtcaatggccttagatttacctctcacggggcatccacagggttcccaggtgagaacaggcaaaaacaaggtgaagacactttccaaatctccagcagtactgagcttgctttagctctgtttgaagaaacaaaacaacaacaacaaacaacaacaaccgcaaatataaccaggattaaggtcagtgttggaagcacttttattaatttttttaaattttttatttctcagatggggtcttgctctgtctcccaggctggagtgcagtggtgcggtctcggctctgcaacctccacctcctggggtcaagcaatcctccaccctagcctcccaagtagctgggattacaggtgcatgccacggcgcccagttaatttttgtattttttagtagagacagtgtttttccatgttggtcaggctggtctcgaactcctgacctcaggtgatccgcccaaattgccctcccagagtcctgggattacaagttaattgagttaataaagctgttctgaactatgaaaaacattagtttgctcccagattttcttgatttcagtttgattattatattcagctgctgccctaatatgtttgagcatgttactatttaaatgaccctggctgtttgatttgttatatataaatctaaactaaaacaacttaaaggacaggtttgtactattattaggatgagatattctgggtgcccctcatttgctccatgaacctccacatttttaatttagaattcacataaattccttgtgagttgtgtcagtcatcgagagacctaatctctaacacctttacccagaaccttctccagatagaccacccacaggaagaacatttatagtaatttatctacatggtggaaggtacttcactgccattgtagaaccctcttcccagccttcctttatgaggcaaatgattgccagtatggtaagattgaacaaaaggatgtgccagtagggtaagattgagcaaaaatagtcctgagatcctgcagacagggaaggacgtaatagacaaatatcagctttattagaggagactccttgtaaaggtcatagccaagaaaaagaagacaaaatcactgagattaaattctaagaatcttggtccagttcaatcaagccatcaacagccaggtggcttcagtggccactatgcatattaccccatgcctaaatgttctggcttgtacaaagagcttctctgtaaattgcacattgccatagtggaagatggcatgggagattttgtgacaaacacttaaggtgcaataatagctatttttcctttatcatgacaatatgtggcatgcttctagattcatttcatgccaaagaagttcctcagaagggtaaggaaatggagaatcttacacggtccaatgcagtccccaagaagggactttgaatggacagttacactggttactacgatgtgtctctgaccttctcaggatcgaagatagtcatgagtatcaaggtggagatggtctaggtgagagaaaggaagtagtgttcttagaagatggtatgccaagataagcctgactatctctcctcttccagttcctgcaacttcatattgcctgattgagtcacttgcctatggtggtaatgacatcagcaatgcaataaattctctggtggctttatatctggtttataacatgggagatgtttcctcaagagtggtgatgccagtgtggcttctgctctctggtggtgttggaatctgcattagtctgtgggtttggaggaaggagattcagccatggggaagaatctgacactctcacaccctctgtgccttcggtactggactgctcctgccctcactatggtgattgcatcagatattgcctccccaccagacaacacgttaacatggctccttgtacctggctttaaccaagaaagttgtcgacttgactcttcgtgacattgtatagcctggtttgtcacaatctttatttcgggaattatcagtgctgccatcttggctgtcttcaagtatgtcatcctcacagtgtgaagctgtttgacattaacatttttgtcaatgtttgggactaccttacatattccggctcagttcaaaatgagctatgtaatgtagccaggtttccactgagttccactttgcttcttggctgtctattcctgcgcaagtttctatgtattttgtatcaggcttcaattccattatgtttaaaatgttgtctctaaagataaacaaagatttttttaaaacaaccaaacatgcagccatttgaccgagtgtggtctgcattgttagtctcaccatcttctgccctaacaagcaccgaatctaacaacacaaatatcatggaagctttccttggagtagctcctgtaattagaatcattgtattctgccctcctgtcagtggtggaacgttctattggcacatgtggaaacctcttagagggacgagtttctttgaacacaataaaattttaagttaggaataacttatttgaaagcaattcattgaaggttattgctaagaagttagaaacagtcttttggcagtcatttcttcaagatgtatggcagtgtgggagggatatataaagtggaataggaacttgggctagttaaatggaatagcctccaatgttaatctgtttaccttttaactgaatgaaaaagcctatagttgtaagaaaagaaaaaaaacacaatcctcacacattcccttcccatcagcattgaagatgagtgtggcaatgcagagactctatatagggaggagaacatagggaaatgcaaagacaatgggagaaaaaagtcaaggacagtagagcaactggaagcttctgacaccaacagcttgatgaacagggtcactcaacccttggtggacacagagtcacttctcttagggaaactgcagtattctcaggtgacaatatgcaaacatgatgaatgtacacttgctacgtctccagttgtgtactgttttccttacttctgtttggagaaggaagtcatatactcaggtctagtatccgtgtagagggtgctcaccatttgcaagatactaggaaaaatggcaagttagaggcccactgttgtaaaaatcaaccagttctgtgtgtgtgtgtgtgtgtgtgtgtgtgtgtgtgtgttatagaaaaagaagacatggagtgggcattgatccacaagtatatatacctacaggtattcttagatgtaatattcaattgcaggagaccaaacaagataaagcatcccccaaaacccttgaaaatttttgtgctcactatgtgtccactgattaaatgtatcctgagctccagggaagggctccccgatggtttcttagagttcactgggtctcctaaggtcaatgttttcaaaagatggtgtcagtaacatatggtgtcactgaaggagcattttaaactagggcatgacctcttcctatagccctagagacactgagagagaaatcctctgtgagcccagatggaaacctccatgcagggcagaggcagtgctgcagggggcgcccaggacccacccagaacaggctccagccccagagctggtgcacaggaggctgcagaggggatttctcccagaattgagtgttgttttattgaaaaccaaaaaattataacatgttaaaattagaattttgcaaagactatttctattatctctatacatttagaaataaacaaatcaacaattcagtgagaaccacatttaaaaggcaaaattgttacttgtttgagatattttcctagtaaaaagatgaagaacagggatggttttattaaatcaaaaggtacacatttcagaagacgcagagatcccaagagtaagactgcagacagcaaagcctagaaagggcggaggctgtccatgtgccatgtcctgtgtgagtcaccttcttagtggagaagttctcccttcacaaagttttgggcatataaagggaaacacgacattaaataagaacgaggacttgtacctcagcatcccacagttgtgtggttcatgtgagatctattttctctttctcatgctggatcaagggtaaggctatgaagtagtagttctcgtgaatatgcaaatcacctgaggtgaacactacagatatgtctgtgccctgagagcatcacccaataaccacacaccacaaagacactcgctgagaagagcaaccctaagacacataattgtcagattcaccaaggttgaaatgaaggaaaaagttttaagggcaaccagagttgtgccatggcacagtgttgtgccatgtcctttctctgttttcttgcctgtttatttatgtcagatgtgccacctacatggaataaggtcagaattctgcctccagtaacacatcaaaggtgacctttgattgtacttttggtttatgctccaaaatattgattataaaattcatcaccgtcatattttatgtcaaaataaatctgcataatctgaatgtcagtacattttggaatctattaaataactgaaattgcaagaaatattacccactccaaaaactggagagatgggcatgtccagaatggcagttagcacttgcttacctggtgcagaaactgcagaagccacaagctgttgagggcacttacatggtaaccactacggacgtctgaaagacaaatgtggactcggtaaatgtgaccgttccagagggtcttatacttctaaggtttctggactttctctccagaaacctccagattctaaaatatacaatccaaataaatttccgatgggtcagaattgaagatgaaatgaagatgattaattacagagaaatataccaggagcccacttcaaaagcttctaaagggaatgacttttccagaaccttatcctatgtgaaggaagacaaatctcccattccagattctcccccattcttccattattatatgaatgagtaaagttagccaaaaggggtaagacgtacataaatagtccaaggaggccgaaacctcaaaagggagtaacagccaaaaatgagcttttcccctggagatgctttgtcaaggtcacagcccagaagaggaagcctattgaatctctaggtttccattggaagaacaggcagtgcttacctgcactgcacaatccattctaactaggatgatggctatggattaaagatgaaagtgtggcaatgcacagactccatctgaggagaacacagaaatactaagacaatggcagagggtgagacaaagacagtagagcaatgtgaagcctctgacatcgtgatttttaagaccaacatcttgtaaatgccatcatagttctcagcttcttttattatgggacctttgctggtttcctagctgagaaagtgaaaataacaacctgcatggacttcccaagtctccacctgtatcctgtttgctttagatctctaggagaagaaagtcagataactgggcctggtgtcagtgtaggaggcacttcctaaaagccacatattaggagaagggaaaatgtgtgttattggaatagtggatatggagtgggctttcatttgaatgtatctgcacctgctagtattctcagatgcaacattcaactgcaagagcccagtgaagaaacatggcactcgcaaatctcttgtaagtttttgtcttcattttggttccactaatgaagtgaatctggagcttcagggaaggggctccctcctgtgtcattgaatccttgctctgggtctccctgcagagttcaataggtttagtaaggctaatcaattgtttcaagagatggtgtcagcagcatatggtgtcactgaaggagtattctacactagcacacagccatttcatgctgggctagagaagcctgggggaaatgatttgaagtctcagcaaggaacctccttgcaaggcaggggctgggctgtcgggggcaccgagcaggtgagtcagaaatcaatatgtaaagatgaggacctatggatatgaattgaaaatatataaatacttcaaaaaattccagtaaattgagtccaaaattaaccccaaattattcaaaacacaaattccttgacaattattttgggagcagtgagttcataaagaattcaaaactactgtttcagcttctgattcttattgttcctgagatgagaaaatcatctctaatcacacatcacacagcaaatctgtaaacaagagtgtttctatggaagatcctgggggatctgaacaccaggcaggtgctggagaccctgtttcaggagcgcccagcagatctcagagggacctgctggtcactcacgtgggacatcagcagtaactttctcagtcaccagtcagctgtgctggtgactgatggacccaggacagaaccaaggcacctcctcagtgtcatggagagtgatggttccagaaatcatccaggtgctctctgtgcttataaaatgtaggttcactgtgaggagcatgttctgagggggattgttctgtgaaaggacctctgttcatgagtgttcataaatggagcagggcatgcatttcctcaaacaggaatagcgcttggaccatcagcatctcactcttgtaaatctgatgtgtcatttatcttccctttcttattattgaccaggctttgcgctatgaaatgctctgtctcatgaatatgcaaataacctgagatccactgaggtaaatttggatgtctgtgccctgagagcatcacccaacaaccacatccctcctctatagaagcccctgagagcacagctcctcaccatggactgtacctgggggatcctcttcttggtggcagctgccacaggtaaggggctcccaagtcctagtgatgaggaggggattgagtccagtcaagggggcttttatcatctcctcccttctcctcacagatgtccattcccaggttcagctgttgcagcctggggctgaggtgaagaagcctgcgtcctcagtgaaggtctcctgccaggcttccagatacaccttcaccaaatactttacacagtgggtgcgacagggccctggacaagggcatagtggttgggatgcatcaacccttacaatgataacacacactacgcacagaagttccggggcagagtcaccattaccagtgacaggtccgtgagcacagcctacatggagctgagcagcctgagatctgaagacatggtcgtgtattcctgtgtgagagacacagtgcgaaaacccacatcctgagagtgtcagaaaccccaggaaggaggcacctgtgctgacacagaggagatgacaaagattattagattaaagattttcttagaaaatgacactaagtcattaaagaaaaggaacaatattaatgtgtatttgagaaattttaattatttgagagatttttcatacagcatttattctgtaaacaaatttcaatgattacagaatgaatcaaattaatgaaactaatacagaacttcctctgaaggtatctttgtaaacattaatttcttaatcagtgctgtaagtattttggaacacagacacaaaatcacattttaagtctgcatttatgtctattaaaaatgccaaaaaaatctccttttgtgcatgtagcattttgaattcccaccatcaatgcatgatagttcttggttttccacattcatattgtcatgtatccttatgagaattgtgtgttttaaccaatctagtaggtgagtaatgggatctaatttttatttaaatgcacatgtccctccaaaagttcatatttaacaattttcctataacttctgttgagacgcctctcctgacattcggttcattttaactgcattgcttcatttcgattcattgcaagttgacttgcatattgtttataaaagtcatttcacaaattaaaagaattcatttcacaaatatgtgacttggaagtattttctccaagtctgtggctgtctttattcccttatcagtgtgtattgcagaaacatatgtgtgtgtatgtgtctgtgtgtgtatgtgtctgtttgtacgaatttagactcaaaaacatgtaaaattgcattcattcatagatgatgtatttggcaatatatatgaagtctcattataaaatacactaatagtgattattttttccatgtctctcaactcaggccacaatcaactcatgagtgtttaaacttcatctacttgattggaggactatccatttcagatatttggaatacttctgtaaggaaatgtgttcatcttcccaatatttatttatataatcatctattaatatgtgtattggtttatgaatatatatttcatactctgaagaagatccatgctatattattcattttatcgttcaaatcaccacagctttattaggtcctgggagctcatttaatttggatcctgtatccttacagcacacctcatccttttgtttttgaatacttccctgtttccttgtattacaataaattctaagctcattttctatattaccttttttgtacatagaattagccttttttctaaagattgcttgtttctaatgttaacgaatagcagtaaaataaaaaaaattgtgataccgtgtataattacttctaggacctctcaacctactggcctagtagacgtgcatgtttatatgaacccatgtttgtggacgcatcaaaactatttatgtaactaatcttctgtaactttattatattaaaaatgagaacacactggtctcctgacccaactatgctaccacatggacctttctagccttccttccttgactgtccataaccacccactgcaaagtgaggaatcctatcctaccaactgccttattattacctagttgcacaattttaggacacatgcatagcggtatcagaaatgtaaagctcattggaaatatatttatctactagaatagagtgttatgtgtagtttctttacattttaaacttatagaatttcctcatttccaaagttaattagattagcaacttcattttctactttctttagtgaagtcatttcaattacattatataatatcatttatttgaaattcggtataaaccaaaactatagtcaagtaaacagatagaggatattcaaggaacttagagagtgagtattaaataagtacaaatggcactgtttaagaatagtaaaattatttttagtgatataaaatggttgagacacgatgcagttaatttgtctaaactcataaatgtgtgatggaaaatataaacctaaatatatacaatttttgtaaaaagtatttagcagttcattaaccccaggattaaatgcagactgtatcaagttatctaataacttatttggtgagggtggggatgtcatgagatgcatgcaaaaaagaatgaagtaattttcctcatttgcgtttaagatgttaccattcactaaagacctttaatttaaaaaaaatcaattttctacgtgacccaggttttttcttcctgacgagcaaataacccagataattcttttctttccttggttgagaaagattttccccaaacttcagctcagttcaggcacacactgtccctgaatgggcatttaccctcagatgggtaacacacctgtcaacatggggactcttctgtcagacaaacacacctttactcacgtggattcttccctcagaccaacacacaagtccccacatggactctttcctcagaccaccacatatgtccttacatttactctttcctctagtaatgacatttcctcatgtggactcttgtctcagacaaacaaacatgtctgcatgtgaactcttcactctgataagtacaaatatttccacagtgactgtttcctgacacaagcacatatatccaatgttgaactgttttatggcaaaatgatctcaagataataattataaaatccctcctgacaaggtgtagatctgcatttttttattgtaccttaactttgccttattgtcaagaacaatagtttgcagctctatatgcaccgattagagattggtgtccattttctctggaaatgtatttttatattcttactggatgtatttttttgataatgtttgctactgtgaagatacctgaacagggtccacactagaaaataaaaaagactaatcggcagattaaccctgtgcatccagacccacgagtcctttgatcctgcccccctgaaatggagacacagaggacagatgagcaatgctgagcggtgcacccaagaccacaaaaagaaagacaaggaaatgtgtcccctcccctcctcatgaaaggcagctcatcccctgttccttcaggccctggtgaggagccaacccatgtctgttcccttcctcggtgtccacaccgtggggtctgccctgatttgggcttcccttctcatcaccctcaatattagtgtcccttgtgaatcaggtccagctgcggctgctccacatggggccgttcttccatttcctctgtgtttgcagaagtcctgtgtgaaatttactgatagagtcaggggggaaaattgtacagcccagtggttcactgagactctcatgcaaagcctctgatttcacctttactggctacagcatgagcttggtccagcaggcttcatgacagggattggtgtgggtggaaacagtgagtgatcaagtgggagttctcagagttactctccatgagtacaaataaattaacagtcccaagcgacaccttttcatgtgcagtctaccttaaagggaccaaactgaaagtcaaggacaaggccttgtaatactgtgagagacacaggagagggaatatctgcgtgagcccagacagaaaaatctctgcaggaagacaggagggagctgcatggtagatgctcctcagaaccaccagggcaccttggggacaacctgggggcactcagaaccaccagggtgtgcttaggaccacgggacactcaggatattagggggtgctcaggatcacgagggggcgctcatgacaccaggggacactcagaatcacaagggggcgctcaggacacgagggtttgcccgggaccaccagcaggcactcaggtcaccagggggtgctcaggaccaccagggggcgctcaggacaccagggggcgctcagaaccaccagggggcgctcaggacacctgggggcgctcagaagcatcaggggtgctcaggatatcagagtgccctcagtaccacgagggggcgctcatgacaccaggggcactcagaaccaccagggggcgctcagtacacgggggttctcttaggaggcagctccaaatcagaagcctgagaggctgtggttttcttttaaaccttggtgattcccgacctggtcaagcaaaagtcttccccaggatctctcaccatttcttccttgtaagtccatgattacttttacctacaaaacattaacttagaacaggaatttaattcaacttttaatgctgcatattttccaagtaatactagcaatgatctctcaggacaatttttacaataggttatttatatattttcttgattaaaaataatactattattaaaatagtaaagttataaaaatcacacctgtaatcccagcactttgggaggctaaggcaggcagatcacttgagctcaggacttttagaacagcctggcagcacagtgaggtcttttctatatatatatatgtaaaataataataataataataaatacctgggtatggttccacctgtggtagcagctacttgaaaggctgaggcaggaggatcccttaagcctgggaggttaatgctgcagtgagctgtgattgtgccactgcactccagcctcgttgacagagtgagaccctatttaaagaaaatgtataccctcaatacaaactgtttcaatgattagagttttgtatttttgtgctgtaatagtcaaacaattgtacatgttttttaacattaactcagcatatacatggtattttgtttatttttctttcatctgctgtttttggaaattaaacacgactttaaatgctcttgttctccattttggttggcttcaggtgtcctgtttttcagactatttctccatcttccctttctctttgaaagtattttactttcctcagtctccatgaaggaaaaagaaagtccctttactttctgacctccaagtctgttgaatcagttcccttctcttcataatcactgaagccaaccaagtttagaggataatggttctccttagaatatgctcgtctacctgcagactctctgccctaactcacccttttccagggtcctgcagaccatctcctcgtttccctaagtaccacagagtgggctctgcagctcctgctgccctctgtgtgctcagccctggggctcactagtgttttgatgatcaagtccaaatccccatgtgcttggaccctctgagaccaccctctaggaagatgccattgtgagtgagccctgaaaatcatggactgtgttcagtttcatattcctggatgttctctgttgtaaaggaatattgacaaataaatactagagtttgtattgaatattcatgccaaaaaagttttttaaaaatttttcaaatgaaacaattttatcttgcctagtttgaaaactacaatctaaatttaacaaataatgtaatacaacgtttgtcctattagttattcaatttattaaaaacagactgatatttaaagttaataccattgcacatttgagtgacatatttggcaagaacagcatttacattcagctttaacaaaacatgtatttatatatatttgtctttttagtattggaataggcagacatacacgtagaagagcattattttctactacaacctcaaactgcaaacacaatttaaattcaattaagtaataaaaaaaatatgaaacaaatgggtgtgctgttttggtgtttagatatacattcacttttgcatgggcacatgtatgtgtctttgctgggctgttgtgtatgtatgtgtgtttgtagaaccatgaagttttcaaatacatcattaaatgacatagttatattaatcttggccaggcatggtggctcaagcctgtaatcccagcactttgggaatcttaggcaggcagatcacctggggtcaagggtttgagaccagcctggtcaacagggtaaaaccccgtctctactaaaaatacaaaaattagccaggtattgtggcacaagcctttagtcccagtgtggcagggaaatgtggggtcggaaatcccacacagagtttctactggtataccacctagtggagctgtaagaagaaagccactgccctccagaacccagaatggtagatccactgacagcttgcaccatgtttctggaaaaaccacataccctcaatgccagctcgtgaaagcagccaggagggagactgtgccctgcaaaagttttttaaaacttttcatttgaaaagttttaaaaaagttctgtcacaggggcagaacttcccaagaccatgtgaacccacttgttacatcaggtaacctggatttgagacatggagtcaaagaagattattttggaacattaagatttgacttcccagctggatttcagacttgcatgggacctgtagtttggaccaatttctccatttggaatggctgtatttacacaatgcctgaactcccattctttctaggaagtaactgacttggtttttattttacaggctcatagatggaagagacttgcctcatctcaaatgagaccttggactgtggacttttgagttaaggctcaaatgagttaagactttggcagactcttgaacaggcatgattggttttgaaatgcgacagcaatcattactctagaggaccacacgtgaagtgcaacaagcaggcgcagaagacaagtgattcgtgatttcactgtagtttgtttaaatggtagactcacagaagtagaatagaatgttggttaccaggggctggaggggtggactggaaaaggagagattgtggtcaaagtgtaaaatgttccagttagacagaaggagtaagttacagtgttctaatgcacaagatggaaaatatggctgtgaatgcattatatatttcaaaatggctaaacatgcaaatgttaaaattttttcccactaagaaattatacaggtcgggagcgggggctcacacttgtaaacccagcactttcggaggccgaggtgggtggatcacaaggtcaggagttcaagaccagacttgccaagatggtgaaaccctgtctccactaaaaacacaaaaattagccaggcgtggtgttcaccacaggagaattgcttgaagcaaaggctgcagtgagccaagatcataccactgcactccaaccggggtgacagagtgagactcagtctcaaaaaaaaaaaagaaatacatttatgaggtgctggatatgttaaatagcttgattaacaattccataatgtatgcatgtatgatagcatgtgtgaatggacctgtatgaaggtgaggtgccctggtcacgtgacagtgaggtgacttgggggaggtgtaaggttacctgggggtatgtgtgcggtgaacttgggcacatgtgaggtgacccacggtgcatgtgtggtggcctgggtgcgtgtgaggttacctggacatgtatgaggtgacatggggaattcgtgaggtgacttggatatgtatgatgtgacctcaggcatgtgtgaggtgacctggccgacgtgtgaggtgacctgggggacgtgtgaggtgacatggggaatgtgtgaggtgacctgcgggaatgtgtgaggtgacctgcgagcattccaggtgacctggggggtgtgtgagcttagcaggagtgtgtgtgaggtgacatggggtatatgtgaggtgacccccctgacgtgtgaggtgacctgagcacatgtgaggtcacctaaggcacatctgagttgacctgggggatgtgtgaggtgacctagggaaatgtatgagctgacaaagggcatgtgtgcagtgacctgggtgcatgtgaggtgacctggtgcatgtgttagtttacctgggggatgtgtgaggtgaacaggggcaggtgtgaagtgcctgaggaatgcatgaggtgacctggtgcatgtgtgtggtgacctagcagatttacgaggtgacctgcgggatgtgtgaggtgaatagggacttgtgtgaggtggccacaggaatgtgtgaggtgacctgggggatgtgtaaggtgacattggggatgtgtgaggtgactcagggcacatgtgaggtgacctgggggatgtgcaaggtcaccttgggtgagtgtgaggtgaccttggggatgtgcaaggtcacactgtgtgagtgtgaggtcatctgggatatttcaaacttcgtaaggaaagcctgcaacagtatatggcactaaaagcttcacactccaacaccgttaatgcgcacatcctcaaggaactctaagtgtttccaggttagcttaaatgccatggagcgacacctgccccaggcacactcatatatgcatcctgggtctccctatcaacccctatcctcaaattttcagtttatgtttgctccatgatatcaactctgatatgttgaaggttttttttttcttttatttgtagttgttcaggtttgctatttcactctcattactctgggctcagtcctctcctcaggtgtcccacttcagagcttgctatataataggagacatgcaaataggaccctcccttttctgatgaaaagcagcgcagcctgaccctgcagccctgggagagaagccccagccctgggattctcaggtgtttctattgggtcaacagcaataaacaaattaccatggaatttgggctgagctgggtttttcttgctggtattttaaaaggtgattcatggagaactaaggatattgagtgagtggacatgagtgagagaaacagtggatatgtgtggcagtttctgaccagggtgtctctgtgtttgcaggtgtccagtgtgaggtgcagctggtggagtctgggggaggcttggtacagcctggggggtccctgagactctcctgtgcagcctctggattcaccttcagtaacagtgacatgaactgggcccgcaaggctccaggaaaggggctggagtgggtatcgggtgttagttggaatggcagtaggacgcactatgtggactccgtgaagcgccgattcatcatctccagagacaattccaggaactccctgtatctgcaaaagaacagacggagagccgaggacatggctgtgtattactgtgtgagaaatcctgtgaggggacacaagtgcgagcccagacacaaacctcctgcaggaacactgggcgaaatcagctgcagggggtgctcagggcccactcatcagagtcaaccccagagcaggtgcacatggaggctggggtttgtttcctgtcaggatttgggacttcctctgcttctgacagtttccctagggaaactctttaattttagatttctgtgcccaccaatgtcatctctacatatatttttttaaatcattataatacgaggactcattctcacatgcacaatatgtatattgccacctacgggaatgaaaactcctcaaccatggtcaccagcatcagagttgtgaggaagctcaggggtgcctggtgagtcttctccagtcagactcaggacagtaacctcaatgggattccctgactagaatggcttttagggatttcgattacagccaagagagaggctggaccaggttcagtgtcatgtaggacctcacagattttatgtatgacatttctcctgacaataaagtatgcaaatgagtatcagtcactgatctggtgcttcctgactttcatttttagtggttctcgcttttccatttgattttcctgctttctggataaaaggatgttgtccctgtggtctaaatccctggggctcaagccctttccctggagcttaggtggggctcaggctgtgactcctgcagccattgggagaggctgctgagactttcttctctctcattgttcaggatactccactctgttttctggagacgcgtctgagaacgcgtgtggccattagtaatgagggcacaagcttctttggtcaaaatggggtgaggatgtggaattgatcctgtgctgtgtaaactgtcacagagtcaccttcttcaccagtagtgttagaagagcttgtaaaatttgtcggaatccaactggagtcccctgtgttcaaaccctgacaaatggagctggggaaggccatggatggaagcttctcatgcacatacccctgagaacaagacctagctttataacactccaaaaaaccacaaattgaacaaaggcaaccacaacaataaaagaattacttatatccctgagaacaagagctagctttataacactcagaataaccacaacaacaaaataattacttatatacctaacaacaagagctagctttttaacactcggaaaggccacaatcttgcacaaggcaaccacaacaatgaaagaattacttctgtgaaaatatctgcacagcaactgcctatccaaccttacactgatgtcaaccttgttattgatgcttctagcccaggatcgtcctcatcaaaatgtcattcagatcctgcctatgaaaaaaattgtgtttttcagtgcactcatgttctagtaaagccctcagagaccctctccttcacctgtgctgtctctggatttccaatcataaccagtacttcctcctggagctgtatctgccagcccccagggaagaagctgaagtgggtcaggtgtgtaggtcacgaggaaacacacagtgcaacccgcttctcaagagtccagtcaccacctccagatccacattcagaaaacagtttttcctacagctgagctacccgcacaatgagtaaaccaccatggatttttatacaaaagacacagaaggggaggtcattgtgaggccagacacaaacctccctgcagggaagctcaggacaccagggggtgctcagacaccaagggctctcaggacacatcaaggcaggtgcaagaggggaaaaaaggtgctggaggtggggtttttcatcactgtcatattttactctccactatatttattctaatgtatattattttattattagacaatgatatttatataaatatatagccatacgtaggtgcaccaagttgtcctttccatcttatgtggaccttgtccattaggacgaagtccctgtatgtatttgagcacctcataagttatggttaattatgtaggatctctcactttttctgtgtcccttcctccctcctctctcacacacaaactgacacccacaaagagttctacaactttaattacctgatgcgttgaagaaaatttactgaagtgcagctttttcagtttaactgctgttcatgttgatgtaggaataagaacattgtctttctcaactgtgtagctctctaagctgagtagcacctttatttataatacccagatactgaaagcaatccaaatattgatcagcaggttaagcagtaaacactttgttctaaattcgttcacttgaataatacccactgttcaaacaagtacggctggaaatgctcaacaagggtaaattcacaagtacttatgaagagtaacataagccaaagaaatacaagtacatacatacagttccacttttataaattttataaaatgaaaactaatctaaagttacataatgaaaaccagtagttggccgtggacatggtatgagaagggaaggtgtaggaagtggcaattacaggacaacgagaggaaattttgaggataattttttctgtattgagaaaggttatggttatgtcattatttgtcaaattgtacacattaagtgaagattattactttctaatttcgacttcttaaaatactacaaatttaaacatatataatttggtagaaaaggagttagagatggataaaatatatgagaaataaaaaagaaaatctcagaacgatggcataaggattcaaccatcaaactaaataaattttaaatttctcaacacagaattatagattcataaaaccagctcctggattcattgattttgtggaattgatttacatgtctttatctccttcagttctgctctgatgttaggtatttcttctcttctgctagcttgtgaatttgctcttgcttctttagttcttcaaattgtgatgttagggtgtcagttttagatctttcctgctttctcttgtagacacctagtactataaatttccctctacacactgctttaaatgtgtcctgaagattctcatatgttgtgtctttgttctcattggtttcaaagatcatctttatttctgccttcatttctttatttacccagtagacattcaggaacaggttttccagtttccatgtagttgtgcagttttgagtgaatttcttcatcctgagttctaatttgattattgcacttgtggtctgacagactgtttgttatgatttctgttcttttgcatttggcgaggagtgtattacttccaattatgtggtcagttttagaatatgtgcgatgaggtgctgagaagaatgtatattctgttgacttggggtggagagttctgtagatatctattaggtctgcttcaagtcctgaatatccttgttaattttctgtctcgttgatctgtctaatattgacagcggggtgttaaagtctcccactcttgttgtgtgggagtctaagtctctttgtaggtctctaaggacttcctttatgaatcggggtgctcctgtatttggtgcatatatatttaagatatttagctcttcttgttgcattgatccctttaccattatgcaatgcctttctttgtctcttttgatcttttttggtttaaaatgttttatcagagattaggattgcaactcctgctttttttttttttttgctttccatttgcttagcaaatattcctccatccctttattttgagcctatgtgtgtctttgcatgtgagatgggtctcctgaatagagcacatcaacaaaataaatagacagctagccagattaataaagaagaaaagagagaagaatcaaataaatgcaataaaaagtaatgtaggggatatcactactgatcccaccgaaatacaaactaccatcagagaatactataaatgcctctatgcaaatatactagaaaatctagaagaaatgcataactgcctggacacatacaccgtccaaagtctaaatcaggaagaagtcaaatccctgaatagaacaataacaaattctgaaattgaggcagtaattaatagcgtacaaaccaaaaaaaaagtccgtgaccagatggattcacagctgaattctaccagaggtacaaagaggaactggtaccattccttctgaaactatttcaaacaatagaaaaagagggactcctccctaactctttttatgaagccagcatcatcctgataccaaaacctggcagagacacaacaaaaaaaagaaaagctcaggccaatatccctgatgaacatcaatgcaccaattctcaataaaatactggcaaaccaaatccagcagcacatcaaaaagcttatccaccacgatcaagtgggcttcatccctgggatgcaaggctggttcaacatatgcaaaacaataaatgtaatccatcacctaaacagaagcaatgacagaaaccacataatcatctcaaaagatgcagaaaaggacttcaacaaaattcaacaccccttcatgctaaaaactcaatgctctaggtattgatggaatgtatctcaaaataataaaagctatttatggcaaacccacagccaatatcatacagaatgggcaaaaactggaagcatttactttgaaaaccagcacaagacaacgatgcctctctcaccactccaattcaacgtagtattgagagatctggccagggtaatcaggcaagagaaagaaataaattgtataaaaataggaaaagaggaagtcagattgtctctgtgtgcagatgacatgattgtatatttagaaaaccccatcgtctcagcccaaaatctccttaagctgataagcaacttcaacaaagtctcaggatacaaaatcaatgtgcaaaaatcacaagcatttctataacccaataacagaaaaacagagagccaaatcatgagtgaactcccactcaaaattgctacaaagaaaataaaatacctaggaatagaacttacaagggatgtgaaggatctcttcaaggagaactgcaaaccaccgctcaaagaaataagagaggacccaaacaaatggaaaaacattccatgctcatgaataggaagaataaacatcatgaaaatggccatactgcccaaagcaacttatagattgaatgctatccccatcaaactaccaatgactttcttcacagaattggaaaaaactattttaaagttcatatggaaccaaaaatacatcctgcatagccatgacaatcctgagcaaaaaaaaaaacaaagctggaggcatcatgctacctgacttcaaactatactacaaggctacagtaaccgaaacagcatggtattggtaccaaaacagacatatagaccaatggaacagagcagaggcctcacaaataacaccacacatctacaaccatctgaactttgacaatcttgacactaacaaacaatggggaaagaattccggaactatttaataagtggtgttgggaaaactggcgagccatatacagaaaactgaaactggaccccttccttacaccttatacaaaaactaactcaagatggatgaaagacttatccagacctgaaaccataaaaatcctagaagaaaatctaggcaataccatccaggacataggcatgggcaaagacttcaagtctaaaacaccaaaagtaatggcaacaaaagctaatactgacaaatgagatataattaaaggaaagtgcttctgcacagcaaaagaaactatcatcagaatgaacaggcacctacagaatgggagatttttgcaatctatccatctgacaaagggctaatatccagaatctacaacaaatttacaagaaaaaaaaacccatcaaaaagtaggtgaaggatatgaacagacatttctcaaaagaagacatttatgcagccagcaaacatgaaaaaaccctcctcatcactggtcattagagaaatgcaaatcaaaaccacaatgagataccatctcacaccagttagaatggtgaccattaaaaagtcaggaaacaacagatgctggagaggatgtggagaaatagtaacatttttacactgttggtgggagtgtaattaagttcatccattgtggaggacagtgtggcgattcctcaaggatctagaactagaaataccatttgacccagcaatcccattacttggtatgtaccccaaggattataaatcattctactacaaagacacattgcggcaccattcccaatagcaaagacttgaaaccaacccaaatgtccatcaataatagactggataaagaaaatgtggcacatatacaccatggaatactatgcagccataaaaaaggattagttcatgtcctttgcagggacatggatgaagctggaaaccatcattctcagctaactaacagaagaacagaaaaccagacaccgctgttctcactcgtaagtgggagttgaaccatgagaccaggtggacacagggaggggaatatcacacactgaggcctgttgggaggtaaagggctaggggagggatagcattaggagaaatacctaaggtagacggcaggttgatgggtgcagcaaaccaccatggcgtgtgtatacctatgtaacaaaactgcacattctgcacacgtaccccagaacgtaaagtatcatttaaagaaaggattacatattccattaaatatatatgagaaatcagagactcctgaatatacacatgaatacacactgggtctacctatatttttagggaaacactagaatacagcaaaataatgtcatgattttattaaaaaggggggtttatcaaaccacaccaggcatgtccagctctgtcctggagctggttcagggaacaggtgggtcctgtgtttgggagccatgacaacaagctcacagcgtcagttctagttgaaacctcaaaaaggcaaagggatctcaactaaaatatcatgtggatgtcacatctgtgggtgctgcatactcccccgatgtgaatatggaaaggttaattacctcttgaactctctgccgagattagtgctggtctctcaggaacacccaaaatggctcgatagagccagaaagcagactggctcagggtttttgtgatggtttcgtcgtgggtcagagtgaggcttcccacgcacaggaaggggattgtacagtgcgaaacacccactggtgtcaaatgaggaagctcccgcaattcctaactagattcacattgtgtgataaaagacacacaatagacataacttcatggtcggatatcacaaaatgccgttaaaagatgtggtaaaaaggcaactttaaatttttagtcattggagtgcgtacaacacaaaaatcattttcaatatttgtaacacatgcatgcaataggacaaaggtatgtgatgagggtaaaatctcgaaagtgtgaatcttccagctaccaagtcgtagggtaataactgatgtgtgctgagggaggaaaccatcacgccatagtgctaatggtataacccttggtgaagagagttcaatattttattgaagttttcataatttttatttaaagatgccatttttcaacatactcagatgattgtgagtgccattgattctgtatcgtatgaacaatggcaataccttccatgtttacataatattaaaaaccacgttaagactgaatatttggtgtcatggtgcatcacgttattctagcttccatactagttgttttatttgtttgttttctcctttgttggcatttggtttcgaattcatatgtcaggtctctataatgtaggaatttatttaaaagtgtctttttttgtccattttgatggggcttccaggagacgtaagaacctcctctgcttgcaacacattttaaaattacacactaatgtagaacatctgtatttaatcctggtttttagttaattgacaagctctaataagtgaagtaacttctccattctgggctgattttacatcaggtataggaatatatcctaggtgaaagtttgtaccagtaatatgaattattaggtaataacctccacctttatgatttacatgttattcatcaagaaatagtgttaaatcaggagtctcaatgaaagtattacctaagggatatacaaaatatattgctaatctacataaaacagatgtgaacacactcttagtatccagccatgtttcctgtcaaccacacagtaactttgacttcacttgggacttgttctaattttcaaattagttacttattaatcttaatgcttctagatattatgtgtgactattttagcagagagtgaagaaagacagcctaggccgactaaacaatgaggaaaatcacaacctgatgaaacaggaagcctctggatgtgagtggctccaggattgaataatttgacaactcatgtacccaggaagtttcttttctcaattttccacactgatgcatccagaaagtcagcttcaccccccaggtgactcccataatgcagtgacatggtgacaatattcccatggtcacatacgtattttatatattggctggaaaaggggcagagacagttctgcaattctcctctgaaggaccaggaacacctcaacagaccacctcccctgcccccatgactagaactgcaccacgtgcccacatggacactcatccctgatggggataagaagactccattgatgaggccgactattttagcatataaattagtaaagactgatataaaggtttcaacaactaattgaagtctgttcttctatgtccaccagagactatagatgctccagcgatatcttgtttttctttgctgcgtgactgtgtctcttctccttgttccatcctccagagaatctctttcagctcccacaggtgcattcctctgttacatgtaactgacaattgataaattagtggaagcccttacactaaaggaagagtctctgacctcatcttggtccatattcctagaaaggcattgtgcccgtaagtctgggtgtgaccttctgagtgttcctgaccctcctccagaggagatgctcatctgtgtgttcttgtccctttcactggggtagaaccaccctgtttcccccaggtgttccctcccacagctccagtgttccgcatcagtgtcatcacctcccagatctgctgccctgccctgcagactaaagctctgattccataagaaggagagttatgtctcaacagaacttcgtggcagtgacctctgttcccatctcaattcctgaggggttgcaccagtgcccctagggtactggttttggtggttcccctgcaaagtaatttttggttctgtagtggatataagggagtcgagtctgaatgcctttcaaaaatgggggctcttgttctctcccagacagacactttgggaaaggaagattttgtgactgccccttttttggggaaagggattcaagaggatagaaaagctcttcagtatgtggtcccttagaatttcaaactacaacaagcttaccatattcagtttcaagcaatcccatatatatttgtatttttatctttaacagactatatttcatatgccagactctgccttaggtaatctcatatgctggctttgttactctctacaagaacttgcttcttgttaaatttaagattttttttaacttcagttatcctaagcattcagaaatttgcaaaatttcatcttgactgtttatctgttattgttgatgtagttgtaagaaataaagaatatatatccctcatttatgtacattttcaagtcgagtagtagatttttagtactaccagagtaataaaataatttgaacattgttaagctgcttaacagaaaatcaaattatggtaaatttgttcaatggaatactacacaacatttataataaataattgtctgatacatgcaacaagaaggtaaaatatctaagtatttttgctgagtaaaataaaccagacaaatgagaagatttaccatataatttcatttatataaattctggaaaataaaaactgaacttacttaagtaatataacaacaaggtaaaatatctaagtattgatgttcaggaaaataaagcaaatgaataagaatatgtactatgttattccattttaataaactctgataaattaaattgaatctacagcaatataaagaagaacagaatttaccatttggggaaatggtagaagaagggaagaggaaaggaggaggaatatagaagaatgagagggaaattttgtgaattttctggttcaccttggtaactaggatggttacatcaggtttatcaattgtacactttaaatatgtgaagtttattatcagtaaactgaaatttataaaatttattaccagcaaacaaatgaaaacttgcacaagaaataagtgacataaagatagaaaaaatattaaatttcagaaacacctaataatttatcttcgtgaaccctagttctcaccatatttttaggtgaatgctagaatgcagcaaaattacacatgctctcaatacagaaagtgggtttcacaaaccacactaggcatgctcagctctgtcctggagttgggttagggagtaatatagggccagtggatgaggagcacaggcctagatactggggctcactaacctcaggtatgagctcttagatacatacaaagcccctccacgcatgggtttacttccccatctgtaaattgagaaaccattgacccctaaaaatatgatttacacaaatatgtaaaaatgtaagagagtgattagtgcaaagtgtttatcacagcacaatttcataacaagacagcaagttttccaaacagcatcattgtcattagattcctgcagggcatcattaccttatctgggccctgccctctgttcaggcatcccaccccagagcttgctatatagtaggtgacatgcaaatagggccctccctctcctgatgaaaaccagcccagtcctgaccctgcagctctgggagaggagccccagccttgggattcccaagtgttttcattcagtgatcaggactgaacacagaggactcaccatggagtttgggctgagctggattttccttgctgctattttaaaaggtgatttatggagaactagagagattaagtgtgagtggacgtgagtgagagaaacagtggatatgtgtggcagtttctgatcttagtgtctctgtgtttgcaggtgtccagtgtgaggtgcagctggtggagtctgggggaggcttggtaaagcctggggggtcccttagactctcctgtgcagcctctggattcactttcagtaacgcctggatgagctgggtccgccaggctccagggaaggggctggagtgggttggccgtattaaaagcaaaactgatggtgggacaacagactacgctgcacccgtgaaaggcagattcaccatctcaagagatgattcaaaaaacacgctgtatctgcaaatgaacagcctgaaaaccgaggacacagccgtgtattactgtaccacagacacagtgaggggaggtcagtgtgagcccggacacaaacctccctgcaggggcgcgcggggccaccagggggcgctcgtgacccactgagggcgggacaggtcccaggagcaggtgccgggagaggtttcctttctcctcagctggaaaagtcaggtttatcttcgcaggactctggagtcttctaggctgtgatattttgttacttatatttattatgaattttatcattaatacttaaattttagtaattattaacattctacatattattatatttttaagtatatactttcaagaaataaacattcctaattgcataataattattgtaacataattattgtaacatataattatatcctaaatgcataataattattgtaacaatcacattctcattttgtatttgaattttcatatttattttactaagattttaattttaatataaaatatttttctacaattgtctgttttccatttttgtgagataaaattagcatatacaaaaatgcacagattctccaggtacagttagagggtttcaggcaaatgtgcacatacttgtctacagcagctaagtgagggtgaggaacaggtgaggtccatctccccacaaagtgtcctcttagtgcttccagttagttctcacataaggatttttttttatttcaactttataatttagatacagagggttcatgtgtggatttgttacatgggattactgagtgatgctgaggtttggaatacagatttcttcaccccctccctccatggtctagcagtccacagtgtctgttgctcccatatttatgtctatgtgtgctcaatgctgaggtcccacttacaagaatatgtggtgttcagttttattttcctgaattaatttgtttaggattaagaactccagctccatttgttttgctgcaaaggacatgatttcattctttcttatggctgtgtagtattatatattttacatgtaacacattttatatatccactctaccattgatgtgcatctgggctgatctttgtctttgccactgtgaataacacagcaataaacatacacatgcatgtgtctctttggtagaattatttgtttaccttgtagtgtataccctgtaataggatagctggttcatataatatctccattttaagttttttgagaaatctccagtctgctttccaaagtgggtggactaatttatattcccattaacagtgtgtaagtgctttcttttcaccacagccccatcagtatccattggtttttgactttttagtgataaaaatttgagtggtgtgaggctgcacacctacaaccatatgatctttgataaggctgacaaaaaaacaagaaatgagaaaggaattccctgttccataaatggtgctgggacaactagctggccacacgacaaagattgaaactggatgtctgctttcaacatatataaaaattaactcaaaattgataaaagatttaaatgtaagacatcaaactataacaatccttgaagacaacgtgaaaatactcttctcgacaccagctttgacaaatactttttggctaagtatgcaaaagcaattgcaacaaaaacaaaaatagataaggagagactaatttgctaaagagttactacacagcaaaccaaccagctaatcaaccaaacaaacaaataaacaaacaaaactatcagcatagtaagcagacaacctacagaatgtgggaagttattcacaaatattgcatccaacaatgccctaatatccagaattgtattagctggttttcatgctgctaataaagacatacccgatattaggaaatttatcaaaaaagaagaagaagaggtttgatccacagttccacaaggctggagaggcctcacagtcatggtggaatgtgaaaggcacgtctcatatggcagcagacaagaaaagagaacttgtgcaggaaaatccccctttataaaactatcagattttatgagacattcactctcaagagaatagcatgggaaagacccacccccatgatttaattatctcacagggggtttattccacaacattaggaaattactgaagctccaattaagatgagaattgggtggggacacagtcaaatcatatcattctgcccctggctcctcctaaatctcatgtactcacatttcaaaatggatcctgccttcccaacagtcccaaattcttatttcagcattaactgaaatgtccgcattccaaggcctcatctgagacaaagcaagtcccttctgcctatgagcctgtaaaatcaaaagtaagttaattacttcctagacacaatgggagtacaggtattgggtaaatagagcaattccaaatgggagaagttggccaaaacacagaggctaaaggccccgtacaagtccaaaatccagtgggacagttaaatcttaaagctcaaaaaagatctattttgactccatgtctcacatccaggtcatgctgatgtaagtgttgggttcccatggtcttgggcagctatgtgcctctggctttgcagggtacagtctttcacccagctgttttcaccggcttgctctgagtgtccatggcttttctaggtgcatggtgcaagctgttggtggatctactattctggggtctgaataactgcggccttctaatcatagcttcactaggcaatgcaccagtggggactctgtgtgaaagcacccaccccacattttctttcctcgctgcccctaacagaggttcccatgtgggcccctccctgcagccaccttctgcctggacatccaggcatttacatacatcctccgaaatctgggcagaggttattaaacctcaattcttgacttctgtgcacttgcaggctcaacacaaaatggaagatgctaaggctcggggctttcaccccctgaagccacagcctgagttatatgtaccttggccccttttaatcatggctggagcagctctgatgcaaggaagcaagtccctagactgcacacagcagagggaccctgagcccagcccatgaaacaattttttcctcctaggtctctggcttatgatgggagaaccttccacaaaggtctctgacatgccctggaacattttctgcattgtcttggtgaccaacatttgggtcctcgttacttatgtaaatttacgcagctggtttgaatttatcctaaccaaatgggattttattttctattgcattgtcgggctgcaaattttctgaacttttatgttctacctcctttttaaaactgagtgtgtttaacagcacccaagtcacaccttgaatactttgttgcttagaattttttactgccagatacctggtatcatctctctcaagctcaaagttccacaaatctctaaggcagaggcaaaatgccaccagtctctttgctaaagcctaactagagtcacctttgctccagttcccaacaagttccttgtctccatctgaggccacctcagcctggattttattgttgacatcattatcggcattttggccaaagccattcaacaaatctctagagagtttcaaactttcacacattttttgtgtcttcctcttagccctccaaactgtttcatcctcagcgtgttttccaattccaaatttgcttttatgcttttgggtatcttatcagaagcacttcactcaactgataccaatttaccgtattagttgcttttcatgctgctgataaagacatacctgagactgggcatttacaagagaaagaggttgaatagactcacacttccacgttgctggggaggcctcgaaatcatggcagaacatgaaaggcacatatcacatggtggcatacaagagaagagaggacatgcagggaaactcccctttataaaatcatcagcaagacaggagaactcatgcagggaaactcccctttatcaaatcatcagatctcatgagactaattcactatcatgagaatagcatgggaaagacccccccccaccatgattcaattatctcccacggggtccctcccacaacacatggtaattatgggagcagcaattcatgataagatttgtgtggggacacaatcaaaccatatcaagaatgtataggaaacttaaacaaatcaagaatcaaaagacaaataaccccattaataaatgggcaaataacaagaacagacacttctgaaaagaagacttacaggtggccagcaatattttaaaagattctcatcatcactaaccatcagaaaaatgcaaatagaaaaatgttctaatttttgtcattatagattgattttttctgttttgaacttatttttgctattttttaggtttatttatgtaatttcatgtctcaaggttttgtcattgtatatatacatatgtatgtactaatacacatatgaatatttcatatctgaatcaatccataacatcagtaaatgacagtttattaagtaaataaatcagtttattatgtgaaataatgacgatatgtatatttgttttcctgttgatgaaatttaaatttgtttccaacataaatattataagcaaactgttataactatttttgtgcaagtttttctgtttatattctcacatattgataaaatatgtagaaatataagtatgcttttttattataagacttacattttcagctttatggagctaaagttgacaaataaaattgtatgtatttaaggtacaccacttgacgtattgatatacatgggaaaatgctggatggtagataagtaaacaatgctaaacagcactaattatcagggagatgcaaattaaaactgcagtgatatttcttaaaccagtcagaacagctactattaaagagccaaaaataacaggtattggtgaggattgaaggcaaaaggaacgcttggacacttgtggtgaggatgtagattagcacagcctcgatggaaaacagtatggagatttttcaaagaagtaaaagtagaactactttgattcgataaccacaaataactacctaaaggaaaaataaatcattatatcagaatgataagcagacttttgttttcctgcagaactattcataatagcacagtcatcaaacttaggaattaacctatgcctaacaacagatagttttataaagaaaatgttacatatatatacatttaaatactatccagccatattaagggatgcaatcatatcttttgcagctacatggatggaattcatcattattttaagtataataattgagaaacagaacatcatacaccacatgttctcacttataaatgagagtgaactcatatgtgcacaaggacatagagaaaggaatgatggacattggagactcagaaagatgggagagcaaaaggtgggagaatggtgagaaattacttaatgggtatgatgtacattatttggatcatggatatgttaaagccaagactactatgcaatatatatatgtaacaaaattgcagtcactccccataaatttatacatataaaataaaaacaaatacaattaaaatgattaacagttgataaacaatactgaaaattaaaatttgtgatcaataaatgaaaataatattagttgaacttcaaattttaaaacattttctactcaagtgactatcaagaaaattaaggacaagctgcaaaggaaaaaatatttgcaagtcatatatctaccaatgtaattataacaagaaccggcaaacctcaaagatgtacagatgacacatcagcataggaatgtgattttccaccagagaaatgcaaatcaagaccaaaaggagacactactatagactttctagaaagacaaaaaataaaaaagaaatactgacaatatcagagttggtgaggaagtcagtcaccctagagactaatatattgctagtgggaatgcaaaatgaaaccgtttctgggaaaatcatttacagtttcccataaaattaaacatgtccttaatccatgacctagaactctcactcctaagtatgtcctacaaaggattaaaatcatatgttcacacacgtattcagatgtttaacattgtgtgtgtgtgtgtgtgtgtgtgtgtggtgtgtgtgtgtgtgttagaaactaaaaacaacatggacgtctttgaaaatttgacacaaaccattacaggtgaactccagactttcttctgagtgacagaaggcctgcctgaaagatccccagagacacagtcgtggatttcactgtcaccctcgcatgtcactggcttgggctgggctctctctggctcttccctgaccaggaccagatgttgagctccactacctgcagttggaagtttatattttcaacaatgcactgaggtctaagttgctctgcagatggaaccaaacaaacatgggcgcctttgaacaaacagtgcctgacatttgtactgaccccaggagaactcttcccagctctcattcttcttggttctctcctgcaggccagcagccctgaagtttagcctggatctcccatgcatccacccatctccttccaagtgcattttaccacagcctccactgtttttgaagcactcttgggctttgtaattctccacactctgttgtaaaggaagtcaggtccttcaagaccagattcgggactctattttatgaccaaatttcagcctcacccctgctcctgagagagagctcctagataagattctgcaggtggagattaggagtgtttttcttcttcaatgtagttgctgagcgctcagtgcagggttggggagaaactttccactttgtcagcatgcagctcctgctggggtagaccttcttccatagaagcagggttgggaaccagggggccaatgtcctcagtgctgctgcacccagggcagagccttcatccatcagtggggctgtggaagaagtgagtctctggttctcagtagctcttgtccagaactgagcctctgcagcatgttctgtcggccccagtgtcctggcccctaaggagcagcatcctaaaatgggagctagcatatttgagaataacaacacctacacattcagaagctctttggctttctttccagctaatataatttccttttttttgtgtagcaacctgtacacacgcatattgatgcatacagacctatgacacttttttctcgataagtaaaaaattattgatcactgtgatcttttctccaagttcaccatttccctgaaggtgagcacaggtccttctgcatgtgttcaaacaaaaggcccagagactacctggtaagtgaggtgctcacctggttctggatgtttggtctgtctcctcccctctgttgccccacacaaggtcagcccactctttccaggtccgaagaagagagcacaggtttgtcctgattatatgactcacccagcttctgatgactctcctgttgccagcgtccatggcctcagtgaaggtctcctgcaaagctctggatacaccttcgccagctacgacattcactgtgtgtgacaggcccctggataagggtttgaatggatggtagggagctactctggcaatggtaacacaggctatgcacagaagtttcagggcagagtcaccatgaccagggacacgtccacgagcacagcctacatggagctgagcagtcagagatctgaggacatagatgtgtactactgtgcgagacacacagtgtgaaaacccacatcctgagagagtcagaaatcctgagggaggtggcagcagtgctaggcttgagagatgacagggattttatttgctttaaaggctttttttagaaagcgaggttaattcattacagaaaaaaggaaaatagaaatgtgtatggactctaattatgtgggaaattttccatacaacttttgttctctaagcaaaattcagggagtggaaaacaaatcaaattaataaacctgataaaagaattcctctgaaaatttagtgtgagcataagtttttgaatgggtgttgtaaatattttggaacacagctgctagatcacattttaactctacacttatctccattatataaaatatcaaaatgttttaatgttttccattttgtgcaattataattttgtgttataatcacattttaacactttaactctacacttatctccattatataaaatatcaaaatgttttaatgttttccatttcgtgcaattataattttgtgttcatgccagcaatgcatgatagatcttgttcttccgcatcctcattgccatttggcactaagagtattgtgtattttaatattctaatagattagtagtgatagctcattgctgtttaaatgcacatatttctaattaaaattttgtatttaattattttatataattgtgatgaagtgtctcgtatggtatttggattattttttattgcattgtttctttttgatcagttgtaagtttccttatatacccattatataagtcactcacaaagttaacaaaaaattgattaacaaatatgtgttttacaagtgtattctccaaattgttgttgtcgttttactcccatatcagtgtctgtgggagaaaaatatttatatacatatatatgtgtgtgtgcatatatatatatatatatatatagtgtgtgtgtgtgtaaacttagataaaataattatttcataaatcatacttttggcatcatatctaaaaactaattatgaattccactaacaggatttttctcttgtctccaatctcaggccacaatcacagcataagcatttaaatttctcctatttgatgagaagattattaacttaagatgtttagaattcttctgaatggaaggtgccttttttctaattttctgtattcaataatctgttaatatcagtattggctcatgaatgtttattttttactatggagaagatctagtgctacattatttattttatcgctcaaatcaccacagcttttttttaggttctgtgagctcatttagtttggattctgtatttttacagcatgccccatccttttgtttttgatcacttccctatttcctggtattacaagaaatactaagctcattatctctattatcttttccacacatagaatcagttatttctccaaggattactggtccctgatattaaagaattatattaaaacacaaaattatgatgttggatgtgtgtgttgttaatgtactgtcagtgtttctagaatctctaagctaacaggcctagaaaatgtgtatgtgtatattaacccatgttaactgacccatctaatctatttatgtatccaatcttctgtatgtttattgcatcaaactttagaacactggtatctacaatctactatgatgatacatgaatgtttcaagccttccttccttgcctgtccataccacctactgcaaagtgaggaacccctcccatcatttgccgttcattcaatttgttgtacaattttagaatatatgcgtcgtggtattagaattgttaacttgtacccctgttggaagtatgtttattgactagaataaagtgtttaagtgcagtttctttatactttagacttacagaacaccctgagttctaagttatataggtgagaaactttatgtgccaccttcttcagtgaggttatttgaaatatgttgtatacattttatttgacattctgtaaaagacaaaactgtagatgtcataaatatatgaggattttctagaaatttagagagagggtatgcattaggagaaacaggtactgtttgcaaacagtgaaattttttatgatctgcagtagtgaacacatgacacaatttgttaattctcacaattttatgatgtaaactgtgaatctaaatatatacaacttacaaaattatgtagcacatcatgaacatgcaaagtgtacaaaaataaaatatcaaatacatttacaccgcgtgggcagggaattgcatgagatgcaggcaacaaagaatgaagtaaccttccccatttgcacataagatgtttccattcacaagagacctttcttttatcaggttcatgtgcaaccaagtttccctgctgacaagcatttaagccagatgattcgcaacttcctttgactgagaaagatttccctcaaacttcagctcagtgcaggcacacaccatctctgaatgggcatttaccatcagacaatgcccacacctgtccccacatggacctttccctcagacaaacaaacacatcctcaggttgactcttccctcagacaagcacccctgtcttcatgtgaactcttccctcagataagcacacatgtccccacattgactttttcctcagacaagcacatatagctgacaacgaacagttatgtggcaaaatgagctcaggatagtggtaattatggactccagctctgatagtttgtagaaattgtcatttttaaaattctgactgaagactttcctttattgtagaagacagtcctttacagctctaattgcacagcctacagacaggagtccatttcctctgggcaaggtttatttttatttgtttactgtacttatttgttgataaatattgatactacaaagatagcctatagggtccacatacgagaaaaaaagagtaatgggcagatcaaccctgcaaatccagtcccaggagtctttgaccctgccctccctggaatccagagacagagatgggaagaggcctgctgagcagtgcactcatgtccccagggagaaagacatggaaatgaggcccctcctctgcaaatgaaaagtagctcatcccctgttcctgtagatcctggtgaggagccatcccacatctgtgcccttcctcagtgtccacaccatggggtctgtgcagatctgggctgctcttgtcatcactctcaatgttcaggttccccgtggatcaggccctgctgtggctgttgcctctgtgttttcagaagtcccctgtgaagttaactaatggagttagacagagaaatactacagaccaggaattctgccttttctgcaaagcctctggattcactttcactgaaaacagcataagcttgatccagcaggcttcatgacaggggtgggtgtgggtaataacaataattcaaatagaagttctcagtgggactctccttgagtaaaaagatgattaacaatcctcaaatacactcagttcaggagattctcttttaagatgattaacctgagagctcaggaaaagtccgtgtattactttgagggacacagtgaggggacatctgtgtgaactcagacaccaacctccctgcagggagacaggaggggactgcctggtagatgcttctcagaaccaccagggggtgctcaggacatcagggggcactcagaaccatcaggggatgctcaggacaccagagggcactcaggacactggggggggggtgtcactcagaaccaccagggggcactcaggacactggggggggggggtcactcagaaccaccagggggcgctcaggacactgcggggggggggggggggtcactcaaaaccaccagggggcgctcaggacactatgagggggggtggtcactcaaaaccaccagggggcgctccggacacggtggtgaggggtagctcaggatagcaggggtgctcagaaccaccagggggcgctcaggacactggggggggggggtcactcagaaccaccaggggacactcaggacactggtggcggggggggggggggtggtcactcagaaccaccagggggcactcgagacaccagggagccctcaggacactagggggagctcagaaacaccaaagggcaatcaagacaccagggggatctcagaaccaccaggaggtgctcaggacaccaggggtctctgaaccactagggggagattaggaccccagggggctcagaaccactagggggttttcaggagaccagggggcgctcaggacaccagggggcgatagggacaccaggtggttcagaaccactagagtgtgctgagaaccaccaggggtgctcagaaccccagggggctgctaaggacaatagggagtgctgagaaccaccagtgggcgctcaggacaccagggggatctcagaatcaccaggctgtgctcaggacaccggggggtgctcaggacctccaggagcgcacacgacacaaaggatagctcaggacctacagggggcgatcagaacgccagggtgcgttgaggacaacaaggggctcacaggacacaacgacgtgcttagtaaaccgggggacactcacaaccaccgggggtactcaggacaccagggggtgcccaggaaaccagggagcactgaggacaccactgctcccttaggaggcagctccacatcaggtccctgagtgggagcagggaggagggttcctcttgtatcttgccactaacatgttgggagtttttctgcttcctttgtggtttcaattattggctgattcttcggtacaaagcagagcaagtataaagctctgctttcttggattatgtaatgtttttggctttggatgctaccagaattacattgtactttgagaggattcattcatggtgtgtgcaatagtgaatgaaacctgtaattttaggggtggctttgaaagctatgttaggtgtggctgagggcagtttacaggaaatggtcatcactatagaaggctactcatttctttgcacatttgcgtaagcaattgtagtttatgaattaaaaactgcctgttttcttggtcctttttcttaaatggtcccactctaagggcagtaatgtaatcaagctgtgtttcaaagatctgcaatcaagttaagtctgtttaatgaaatgctttgtaaagaaaatgtacatctattttttagagtcacctttacattttacattgctttacaaatattaatttggtaaatttagtctcataattatcttcagtaattaaaaatcttaaagtcatgtcatgttaaattaagtaatcctaggcttctcactgtgaattagggttactaaaaattagaatagtaagagagtataatcaatttatggtgaagtttattaagaaagatgaagatatgttttttgcttaaaaatattttgttttccagtttacagggcctttctactggttttaagatgacaaccactgtttacatctgacccttttttgttgaacatctgttgagtttctattgatattccacagctagagttttaaagtaaaagctctagtatctttgtattagtgtgaatgtgtgcttgtatgtattatgtacatatatatatattttttgttatgtgttatggctacaaggtacaaaattgactttaaaataaataactattttaaattaagtcaatgagccctaatgcatctgaagtacatgtaacttaaataaatatgtaataaataagctggcttcaaaattattggtaaaataaaattggaaatattttaacaattattagaatacctcatagtttatatcaattgatcaagtgattttatatttaaaatcacagctagatattatatggtgtgaaacatttctatgaagattataaaattattaacctagttaaaaccagaatgatctttgtaatttgacaaataagatgtttaatactgttgttttaataaaaaacaggtaaatagttattggaaatacaatcatttatttaataagaattttacttaggtaaacacctgaaattcatgggttataatatgggtaacagggaaaaaactttaaaggatgagtattactgttttcataaatgatctaggtaagctatttaaaaaataaattaggttaatgtaacaaaataaaccttttaaataaacttgttctacaatttaaaaatctaaagtttaattaaataatagatattaactaaatgtttaggtcattactaattgttttaaaaaatgtatactataagaaaatatttttgtaaaaaatttgttcttacagaaagattttatttaattcagaggttacttataaaacatcctaaacataaccagtaaataagagagatgccactgcactccagcctgggtgacagagcaagattctgtctcaaaaaaaaaaaaagaaaagaaatttttagacatagaggagtacttttggtatgaaaggttaaaataaaaaaaaataattttatatgagaaagaatcttgtaactttttatcctaaaataaaaatgactttatttaagaaacagtgatgtttagaataaaactatatgctcaagtatgccataagcgttttgtgtaagtcaaactaaggtttgtaaaaagttaattaattaaaataacttcatattatgaagttgactataattaaaaaggaagtatttataatagtctttatagatttgtagagatctggctttcatataaaaatatataaatatactaaagattggttaggaatgaaaaattgtgcttaaagtattgatttactcaataaaattataagatattttaattttttaacccaaaagtttaactcttactgcatcttgccagttttattttattctcttttgagaaggcttgagaggatctcaaatttttcatgagctcctctaacattttttttcttacagcagttagcctctaacgatgttaacttctaactgttgttagcttctaactgctattattgcctgatgctaaaaatcttttatattaaagttcttaataaaatgttttatttcaatatagtattctgcactcttgggtttttttaaatgtctatatttgtctatggaaccaaaatcttcacttgtaatccaagacacattcttcctatgtctaattaatcaaatactttgtttcattagagttgacttgcaggttatctgcatggatttccccacagggaaacacagtcacactgctgaaggtgttttttcccatttggtaactggcataaaacaaattttatattttcttgaaatacttcctctgtagctgtttttaagtttttcaactacttaggaatactgagattttgagaaaatataaattattgttattacgttaatgtaactatctggcataacttttaaaggacttgtcctgctacattactgatctttgattcctaggtctaaaaaggatacacaacactttgggaggcttcagagggtggatctcctgagggcaggagttagagacgaacctggccaaaaaggcacaatctcattttaataaaaaatacaaaaattagctgggcgtggtggcgggcgcaggtaatcccaactacttgggagcctgaggcagggagaattgcttgaacctgggaggcagaggttacagtaagccgagattacaccactgcactccagcctgggtgagactctgtctcaggaaaaacaaataaatacaataaaaataaaaaagacaccgagtcttgctaaattttaaactctgacagcaattgaagccccatctagagatgtggaagaaaatgacaataaaaattaatcacacacttaagacacaaggccggaaaattgaatctactcaaccactccaggcccagggactgttacagaagaagcggtttgtaagattgtaaaagctaattttgaaagatgaaattacttgagagtttctttatacagtaaacattaatattaaaggcacactaatgccaggctagtagctgggccatgtgtcagattgacaagggtttcttgaagaattaatccactttttaatttgaaaaacttataaaagtttataagagatcatttgaaattaaattttatggtaaaagtaattataatgtaatagatttatttttcagaattgagagacagttttaacttctctcatgctgttcttataaggggctattgtttagaaaattaattcttctctttgaaaaataaaagtttttgctttctttcaaaatcactgagttctcactgggctaaataaataacttacattacagcaatctgtaatcctattttgtaatatcaagcattgtaaacttttgatatttgacaaacttcacaaaataaaattctaaattcagtcatttgacctcattattcttttatgatattaggtccccaaagccaaaattaaacatattcagcttatttggtataattaaaatatgcaggaagcaatgtcaaatttgcaaaagtgtttaactttggactatatttaaataaatgtggactatataattggactatatttatataaattaaagagtatattttccaaaattgtatgagattcaagtgatttgatatgtcttagtatattttatcagtagtatttatgattattatgtaaaatttctgtttattgccagaaataagcaaatcttctcctcaattctgtctttaaccatggctattctaaaacttcagtcatccacagttggtgttttactttgattctttatcaggtggcttatagtaatctatagaattttgaggagtactcaaatatacgattgtgacaattttataaattgtgccattggtatagagattaaaacttccatgactctcattgatacctgattcatttatgatgattgttaatctaatattaagcaggacaggacttaattgcatgaactgaattgacagaagactgaaattgtttttatggcttattctttaatgcatttgctaattacttatgttctgttttttcagaatcaggaaaagtttgtcttttaagctcttcacagttgttaacaattgagtatggtatactttactgataaaaaaataaaaacataatatcttcttatttacataatttctccaaaatttggaaactgtgagtattcttatatcaaaatagttatttgcataggttcaataaaaacctgctttcttccataacagggcacaattggagacaatggtcattttactaaggctttaacttgaattatatattttcagatttactttataaaatgaatctaacctggagagctgataaagccccttgggaaaactggcatgcacatttttttttttttacagggccccgaactgtagtaagtaaacaatttaatttctgacagacccaggactcccaggttttcttggaaacttgaaaaaagagaaagtaacccaattcacatagctatctggtggcacagataaaatattggctgggcttgaagattttaaagattctaccctttgattccttataaaaaatttccagcaaagtcaatttatggaataaaattggcctatgtacaaacaaaaaatagaaaacaaaaagagagctaatatgttaaagggttactttggctggcatcttatacaaaaaaaccagggccaagtctcataagcctaaaactgattttacaaatagattagtcctactatgattttgtgtctaataaaattggggaattatagagagaaatattatttcaaaataaactatagtgcatcagttaatagattttaaccttgtccacttgcttttcaatttatattattttctacaatttggactgaattttaaagcgtatctttgcacgagtctccaaaataatgttttcagttatttccctttttaaatatttttcctggcttgaaatcagcagaagttaaactgtgctttcttacagctagacaatgtaaattctaaaagaaaacaaaatcaatgatatggtttggctccgtgtccctacccaaatctcaccttgtattgtaataattcacacattgcaagggtggaatgaggtggagataattgaatcataggggctgttttcttcatgcttttctcctgttagtgagtgagttctcacaagatttgataattttatgaggggcttccctcttcacttaacacttctctctcctgcagtcatgtgaaatagcatgtgtttgctacccctttcatcatgattgtaagttttttgtggcctccccagccatgcagaactgtgagtcaattaaacctatttttctttaaaaattacccagcctcgtgtatgtccttatagcaacctgaaaatggactgatacaagcaacttaactacatacgaagtctccttttgtacctgcctattgtgaagagaaaataaatcttgagaccccaaaatcactaagctaaagagaagagtccagctggtgtaataggagatagaaagaaattatttaggtagatagttaggatgaaagagtctctggcaaaacttttcttctcacaagaattagctcagaaataacttcttttctaatcagacacagttcaaagagatcacttctaacaaagagcagcctgaaagatcgggctgtaaaacatagataaacaactctggcagagagggtatttctgtgtgtaatcaccaaagttcacatacataggatgggtcccaataaaaacattgggtcttaatgagcacattcctttccttttctggggtcacactgagataggaaagctgttagcttgcacggggtttgggatgcctccagctgcaaggaggtaccagggacctggcatggaaactcctcccccctttttcagcacatgcatggtggaaggagataaggaacgtggagcagaccaagctaagtccccacctgcataataaaagcatgagatggggctgccagagacttcgctctctgcagatggcacacctggtcctgcttttgcaccttatgttgataagaagccatctccccacgagcacatttataaaaatccttacgttgataagatactgtctccccacgagcacatttataaaaatccttacattttactgcggcacagcaacccatctgggaccctttctgtgacagagagattttttttccttttacacattaaatttctgctctaacctcactctttgtgtgtctgtgtccttgattttcatagccacgacacaaagaacctttggtgatattccagataacaaaggtgctttactggagagggctttgggcaacctgcctcccattctattcaaagtgattcctctgaggcccacacgagacagatacatatctgattgcttcctcttcagtatcatttatgaaaaaatgaagattcactaagtctgactaaattgtggattcagtggtaggctgataaaggacttaaaataatgcaacctactgtgtcttatctacttctaaactgcaaaaccccctttcaatttgtcctgtcttgaaggaaaaaaaatgtacattttacatatattgattgatgtctcatgtctctctaaaatgtataaaatcaagctgtacttcaatcgccttgggcacatgtctcaggacttcctgaggctggtcatgggtgggttcttaactttggcaaaataaatgtattagtctgttctcctgctactaataaaaacataaccaagcctgggtaatttataaagcaatgaggtttaatggacttatagttccacatggctgggaatgcttcaaaatcatgtcaggaaagcaagggacatcttacatggtggcagacaagagagagcttgcacaggggaactccccttgataaaaccatcagatctaatgggacttattcactatcatgagaacagcatgggaaagtgctgacttactgcaggagaactacataattttatattttcctatatgcttctttttcattacacatgtaaattttcataccatccaaatttccccttacccagcttttcctctttatatattgaaagccctaaaaattgtctttggggaatggcactaaccacacacagtttctgtgattacttttatttttcttccaggcatgtcctggaaagacataatttcctttgggaaaattaattttaatttgattaagatctgtctcagaaaccttcggtttacactaggaaagatcccaaattaggagccaattactgtaaaaatcagccataccactctgtgagtgtgtgtgtgtgtggcggggggtgtatatgtgtgtgtacatgcatgttttcatttctgtgggctttaagccatgtagttctctctgcgaagatactatttggcatgacctttgaatagagaattgtaagagaaataagaggctcctatgaattatccgaaagtttctggactcaccatgtatcttgactgtgtcattgcatctgacagtcccagggaagtgactctctggtggtttcatgaatctgtgcttgggctctctctgcagtttactgggtatagtaatgacaaatcactgtttcaagagacaatttcgaaagcattagatgctgctgagagaggattatgaaccaggggacagccccttcattctgggggagcgacattgggagaatatgctctgtgagcccaaacagcttcctcccctgcagggtgagggcagagctgcaggacaggcccagaacccactcaacacagatgtcagccctggagctgctgcagaggagtctgaggagaaaattttaccagcacctgaattacacttatttcaaacaaaaatgcatgtcctgtgagtgtttgtttccctattggaggagttctgtactcatgaagttctggacatgccagcggacaaatatcagtaaacaaacatcagaacttgaacctcagcttcccactgttgcattctccatgtgtcatctctattatttctcatgctagatcaggtatttagctatgaaatattccagctaattaacgtgtaaatagcttgaagtctactgagttaaatacatatattttctcttgtttttgccaggtgttccctcccacacctccaatagtctccactattatcatcatcttctagatcttctgcgatgccctggagattaaggatttgattccatgacagagaggaggtgcatttcgatggaactttggtgaaaaccttggtctttatcccatttcctctggggctccaccagtgcctctggaatcatggtttcagtggcttgcccctgcatggtaggtcattcctttattctgtagtgctgatgagggaggtgggtctgaacgcatttcagtagtatgggctctccttctgtctcagacactttgggaaaggaaaatttttctgagcgtcctcattctagaacaaagggattcaattgtataggaatgctgaaaatagaaaaccttcagccaaattaaggttaataagattaattgagcaatggatgattcatgaattgggcagcccccagaatcacagcagattcaaagagacttcagtgcagtcacggggtggaagaagatttatagattagaaaaatgatgtacagaaatcagaagtgaggtacagaaacagctggattggttacaggttgcttttgtcttatttaaacaaggtgtgcaccctcaagagtgtacgagtggttgaggtatggctgctggaattggccaagactccgctgttgttacaggcgcatgctccgaagttggcttttcaatctcgtccacctattcaggtaggttacagtttgtccacaaggactcaaacacagaagtacggagtccttttcaggccatatttaattcactttatcagtgcccttcagtatgtggttcctgagaatttcacatgacaacacgtttaccacactggaatttaagcaatccaacacgtttgtagctttgtcttgtaatgggctatatttcatgtggcagcctcggcctcagtttagctaacactatggcttcatttctctctacaagaactcatttcttccaagatttccatgttcctgaaaggaaaataaacctttgggacccccatatcactaagccaaagggaagtcaagctgaaaattgtttggggcaaacccacctccattctttccctaaaatgagagctactaaggtttttaaaagctacagacctccttcaaaatttgaccacaagtaaaatccttgtggacccaggacagagagagtcatttctctgctcatgtaagtcaaacgcatacctgattgctccctgtgctctactgtttcactaaatcagactaaggcctacgtgactattcctgtaaattgtgcattcagttaaaggctaatcagaaactcaaataatgcaaccatttctctcaaacctacctatgatctagaagccctctccccacttcaagttgtcctgcctttctgaactaaatcaatgtacatctgatatatatatattgattaatgtctcatgtctccctaaattgtataaaaccaagctgtgcccacaagcttgggcacatgtcgtcagcactccctgaggctgtgtcacaggcatgtccttaatcttggaaattgaacttcctaaatctattgagattagtctcagatactctttggtttacaggtttgtttttatttcataacttcaattatttgacatgctaaagaaaatttgccaaatagcgcattctcttgtttatgtgttattgttgttgcaaaaataatatattttatatataatttatcatctatgtacattaccaaattgagtagcagatttattagtaagacccaaagtaatgaaaagttcagataccaattagcaacttagaaaaacaaattatgctacatttgtttgctgaaatgctacctattatttataaaaaataaacaatacaacataaaaggtttaattctcagtatttctattgagaaaaataagccaaatagatgagtacatactatattatttcattcttataaattctagagaataaaaactagtctaaagaaatatgaaaacatcagtacttttataaagaaatggtagaagaaaaggagaaaaacaaaaatatatctataaaagagcaagaggaattctgaggtgagttgacttgtcaccttcttgaaaatagagactttctttatcaaaatttactattgtacaggttaaatatgtgaattttatcatctgtcaattaaaactcataaaatttattacaagtaaacaagtgaaattttagacaaaaaagggatgataagaaggaacaaataaatacattaaatgtcagatacaccaaaaatgtatctgcctgacgcctagttgtctctgtatttttaggtaaatgcagcaaaatcacacaggttgtcgtggcaggaagtggattctgcaaaccacactaggccgtttatctctgtcctgtagttggttcagagcaactgaggccagctgtgaggcgcataggcccaggtactaggactcactcatgccagatataagccctgagacacgtacatagcccctccatgtgtgggttcacttttacatctgtacatgaagaaaccactgactcctaaataacatcatctatacacataggtaaaaaaattaaaaatatgatagttgttaaatgtttatcgcagaacaatttcaaaataaggcagcattttcccaaatacaatcattgtcatcaaaatcccccaggacgctctcatctactctgcgccctgccttcacctcagatgtcccaccccagagcttgctatatagtaacagacatgcaaatagttgactccctctcctgatgaaaaccagcccagccctgaccctgcagctctgggagtggagccccagccttgggattcccaagtgtttgtattcagtgatcaggactgaacacacaggactcaccatggagttggggctgagctgggttttccttgttgctatattagaaggtgattcatggagaactagagatattgagtgtgaatgggcatgaatgagagaaacagtgggtatgtgtggcaatttctgacttttgtgtctctgtgtttgcaggtgtccagtgtgaggtgcagctggtggagtctgggggaggcttggtacagcctggggggtccctgagactctcctgtgcagcctctggattcaccttcagtagctacgacatgcactgggtccgccaagctacaggaaaaggtctggagtgggtctcagctattggtactgctggtgacacatactatccaggctccgtgaagggccgattcaccatctccagagaaaatgccaagaactccttgtatcttcaaatgaacagcctgagagccggggacacggctgtgtattactgtgcaagagacacagtgaggggaagtcagtatgagcccagacacaaacctccctgcagaatgcctgggggaaatcagctgcagggggcgcacaggacccactgatcagagtcatccccagaggcaggtgcagatggaggctggtttcctgtcaggatgtgggacttcatctttttagagtttctctagggaacctctctaagttcagaattctgtgcttaccaatgccatccctacatatttttaaaatgattattttaatatgaaaacctattctcttatgcacgaaacacagactgatgcttacagagatgaaaagccctcaaccattgtcaccaggatcagagtattgaggaaactcaggggtacctggtgggtcttctccactcagactcaggacagaaacctcagtgagattccctgactaggacggtctttaggaattgtgatcgcagccaatagagagtctgggcaaggatcagtgtcatgtagaacttcacaggtttcacttctgacccttctcctgacactaaagtatacaacttagtatcagcactgatctggggccccttttgctcttagcccattctatttctttttatttgttgttgttgttcttgcttttccttgtagtgttcctgctccctgtaaagtggggatgtggctcttgctgccaaagctccaggtctcaagcccattccctgcagctcaggtggggctcaggctgtggctcctgcagccacgtggaagaggctgatgggactttcctctctcccattgctcagcaccctccagtgtgtcacgtggagactcacctgcgaatggaagtggccaacagtagtgaaggggatgagcttgtgtggacaaaatgggatgtggatgtgaaatttatcctgtgctgtgcaaagtagcacagagtgagtcaccttcctcaccagtagtgttagaaagagggtgtgaaagttgtcagaatcaaaatagatccacttgtgttaaaaccctgacaaatggaactaggaatgaccatgaaggaggtttcccatgcacatactcctgataacaagatcgaccataaatggattctgcttaaccacaacctttgatagaagccaccatgaccttataaaaatcacttctacaaggacatcttcccagcaaatcacggtttaaccctatactgatgccaaccttggtattgactctacaagcaaggaaaatcctctcaaaacaatttatgcaacccacctcattttcactcataaacctatggattgacatcctggagccactgctgcatttgttgttactggtaattagccccttttacaatatttgtgactgtttttctccgatgtctcttggaaaataaataatttacaagctgatggcagtaaagaaactatttaggacatttttaacatcctgttgaatatttctgcatagcacatcggtcccctaaaatacttcgctgtattggcatgtgatgaatcagagtataatgctgaaggtaaaatgggaaatacatgggcttttgatgaatcaagtcatagggtgagaatgtctgtgtccttgaggaaggagaccttgggctgtaagttctagtgggagtacctttggcaaagggatttcatgagtttctgaacgttatgctacttttaatttaagaatgcaacttatcatttatttttacttaaatctttccagaagatatttggcagtaaggacagggtagcattcgtgtgatactgatgacttagagagttattttgtaatttctcctgtaaggtatgcacattgctcacttgatacagaagttcaaatgtcacaggcgggaaaataggaataaagcaaattttattaaatgtcacgactgtagtttttggcaaggaagtgcttcatgtcaacctgaaaatagacagacaacaataaaacatattcaaatccaaagggagtcagacctatgtccctctctcttataagtacaaggctttgccacatccaaaatatcctttaggctccagggtataaaatgcttttggactgtgaagctaacagctctcccctcagacagggataaggcatctggggaatgcagagttgtgttcatgaagaagatggcattactgtgtcttctcctgtgcctggtgatggctcccccagggtgagtgactcggatgtcagatgtgggtctatggggtgagtgtaggtacatgtgactgacggggactgattccccatgtattcacatgccctgtcccaggagcagctgcaggagtcagccctggacctgaagagcacacacttaccctctgcttcacctacaccatttctggccactccatcacaaccagtccttactactggacctggatctgccagctctcagggaggggctgcaatggatacaatgcattgctagtggtggtgggaatccatttgtcttgtggaaaatggcagcatctctttattttataaggcagaataatgttatattgtgtacacataccacattgtctttatccatttgtccatcgacagacacttagtttccatatcttggctgttgtgaatagcgctgcagtaagcacaggagagcaggtatcttcacagggtggtaatttcatcccatttaggtgtatttccataagctggatcgctggtcatatggtatttctgttttaatttatttagaagccaccacactgttttgcataatggtaatgatgggaatgtagaatgtcatagccgctacgaagaacagttttagatttgaggtataatccaaaagcaaataatgtttgatcatggttctcatatgaggctctaataaatctagtggaagtccagaaagttttcccaccttgggcaaggatgagtttgcccctaattgtctttgaggcagaatatttgcagaatgtgagatggagtatgtcggcaggattcaggatgattcagccataaatagtaatggcacagaaaaacagggagttagagacatgcagagaaagaaagagatagagagaatatgaatctcataagaggaaaatctgctggatatcagtgttgggttttcattcatagagacatcagtgtcagcaagaaaccatgaagtcaagtgaggagtggagaacatgttcagtctgaaaatcagcatattctcagaggcacccattgtcccatgacacaggcagagaatttcggaaaccagtgaagtgggagttcacaataagtgatgaagttatcatttttccaaactttcattaatatgcaaagtatttctatagatcactcatgcacatacacacaaaatgtgtttttgcatttatgggtgtctagagaaaaataagtgagaaaatttttccaggttgcagagatctgtttaagttatagattccacaggagagtgtctttgaatgaatactattctattaattaaataggacaaaattccctctgttggagcagccttccaattatgtagatttctttattgcttcttgagttgtgaaacataaacccaaggattgacttactggaattcgagtgctgtgttgataaaatttctgataagttttcttccaatgatttgagaatagctttcctgtttttttactcaaggaaatgaattttcacaaggtttcaggacatcacgtttcaggtgttttacttaaagagactcttcctgggtgcagtcagctttcttctaaccatgagctcacttcttcagcaaaccattcagtttgtgcctctattaagaattatgaagcttttaaacttcaatgcactgaaaatcatgccccttgaattaaatgttgattggcactgacatgaattgtccactcttggatatgtgtcctatgttatgggctcaacatatcagtggactgagaatcctccattagctgcctctgactgtggcactgaccagattgagaatcctcagagtcatccatgaaaaagagagtctttaggttcatggggtttttggagacattcaggtgagtggaggggagaaacaggactgggggtggccagccatttcaacaagactgggaaagattagcatctaagtttaaaggtctacatcattccaaacaccctgcatgacaggctgacaggaagaaatccaaccccacagcggctccatagcatctctttagtatacttggtagtgaagctgtttcagggaagaaacgtccactcaagggagtcagtgatgcttctctgagctacaataaacagtgtattggacccaggtttctctgagttcaatgtgatgattacactcagctgctgctccagtgagtttaaatgagcatgtggcaattcagatgagcctggctgtgtggtatgttatatgtaaatcggaactatgtaaacataaagggcatgtcggaactagtgtgagggtgagagatcttagaggccccacacctcacactcttgtgcttatttgctccaggaacctccaggttctttgagtgaaaatcaacatagatcctttcctggataaatcatccaaatatctaatctctgagaaatacacatgcacatttctccggatagaccatccaggggaaagacatatctagaaccttatctgtgttgggtaaggtagtccatctccattacagaccctcccagcagccttcctttatcatgaaagtggataaaattagccaatagagaaataatcctataatgttatagccagaaaagggaaagcaacagtttcatttctggagactctgcgtataggtcacagcccagagaaagaaaggatgactgaattattaagaatcaattgtaagaacatataatacttccaggatgcacactttgttttctcaccagtataatctgggttaaagatgaaagtgtggaaatgcacagactctatgtgaggaggagaacatagggaaactgaaagacaatggcagagaataagacaaggacagtaggaaaatctgaagcctctgacataaattttttgaagacaaggtcttggcaaatccattgacctcagattcttttatcatggggcatttgcagggttcctagctgagaaaaaaaatgcatgcacttcccaagtctccacttgtattctgtttgcctcagatcgctaagtgaaaaaaagccataaacctaggcctagtgtgtgtgtaggaggcactttttataggctagaaaatagtaagaaaggagaatatgtgttattggaatagcatatacaaaggtgtctttattctgaatttatctgtacctgcagatattctcaggtgcaacattcaactgcaagagcccagcgaagaaactaggcactccccaaatccttcaagtttttgtgttcattgtgtgtccactgactcaggaaatgtgaagcttcagaaaagggggtcccttctgtgtcacagaatcttgtctgtgggtctccctctgtaggtttagtaaggctaatcaattgttaaaagacatggtgtcagcagcctgtggtgtcactgatggagaattctaaaccaggacacagccacttcatgctgggctagagactctgaaggaaaatatttgtgagccccgacagaaacctcattgcaaggcaagagcttctgtggaagggggcacttgggagccaccaagcgcaggttccagccctggagcaggtgcacagctggggaggaggtttcctctcagtgcctgtgttttcgtttgtcaggaaaaaacaatctaaaataactgttcaaaaagtcgctgatgtgctttaaatattctatcacatcaaaaccattcatataacttaaggcactggggaactattttttaaagtgggtttctagaactataatatcttaatagtgagaatatgaaggataggcatgtttttactaattctatgggtacagattagttgaagaaactacattcctatgaataagaaattcagatttcagtgttaagtaatgttgcttacattgtgtgagtgacagggcagtggtggatctgagagtgtggcaggtgcacagaccaagtgagtcagaaatcaatatggaaaggtgagggtctgtggatatgaactgaaagtatgtaaatacttgacgaaatactaataaatggagttcaaaataacccaaaattgttctaaacacaaattccttgacaattactttgggagtagagagttcataatggactccaaactcctgctttatcttctgattcccattgtctgtgagatgagaaaatcagctctaattatgcatcacagggcaaatctgtaaatcaagagtgttcaatagaattgaagaccctgggggatcaggacatgaggcaggtgctggagacagtgtctcaggagcacccagtagatctcagaggtccctcctggacactcatgtgggacgtaagcatcactttctcagagtcaccaatgagctgtgctggtggctgatgggtccaggaaaagaccaaggcacctgctcagtgtgatggagagtgatggttccaaaaatgatccaggtggtctctatgctaatcaaatgtaggctcacagtgaggagcctgttctatatgggcttattcttcagtgaaaggacgtctgtccacaaatgtttgtaaatggagcagggcatgcatttcctcaagcaggattagggcttcgaccgtctgcatctcactcttgttaggctgatgtgtcatttatcttccctttcttatcatggattgggctttgagctaagaaaggctttgtcttatgaatatgcaaatatactgatatccactgaggtaaatatgttctgtgccctgagagaatcacctgagagaatcccctgagagcacatctcctcatgggctggacctgcaagatcctcttcttggtggcagcagccacaggtaagcagttcccaggtccaagtaatgaggaggggattgagtccagtcaagggggctttcatccactcctgtgtcctccccacaggtgcccactcccaggtgcagctggtgcaatctggggctgaggtgaagaagcctggggcctcagtgaaggtctcctgcaaggcttctggatacaccttcacctactgctacttgcactgggtatgacaggcccctggacaagggcttgaatggacaggattttagttatttgagagatttttcatacaacatttattctgtaagcaaatttcagggattgttgaatgaatcatattaacaaatctgacacagaacttcctctgaatcaatctttgtaaacatcaatttctgaatcaatgttgtaaatatttcagaacacaagcacaaattcacattttaactctacttttatctctatttaaaaaatatcaaaaaatctcattttgtgcatgtaacgttttgaatgcccaccatcaatgcatgacatttcttgtttttccacattcatgttaccatttatcatcatgagaattgtgagttttagccatgctgataggtgagtaatggcatctaatttttatttaaatgcacatgtcccaaataaaaaattcgtattaagcaatttttatataatttttgctgggatgcctttcctgatatgtggttcattattatctgcattgttttcttttcattagttgtaagtttacttgcatattgattataaaagtcacttaacaaatccaaagaattgatttaacaaatagatgacttggaagtattttctcccagtctgtggttgtctttttctctcttatcagtgggtatttcaaaaaatatatgtgtgtctgtgtgtctgtgtgtgtgtgtgtgcacagatttagacaaaaaacataaaaaattattcattcatagatcatgtatttggcattatatctgaagtctcattataaaatacactaatagtgattatttattccatgttgctaatctcaggccacaatcaactcatgagtgcttagccttcacctattgattggaggactatccacctgagatatttggaatacttccatgaggagatgtgttcttcttcccatcatttctttatttaatcatctattaacatccgtattggtttatggacatctatttcatactctgaagaagatccatgctacattattcattttcttgttcaaatctccacagctttattaggtgctgggactcatttagtttggatcgtgcatcctaacagcaaagctcatcttttgtttttgaacacttccctgtttcctgatattaggatagattctaagcttgtttctttatcacctttttcatacatagaattagccatttatataaagattgcttgtttctgattttaaagagtagtgttaaaataaaatattgtgataatgggtatgtgtgttgttaatgtggtataagtacttctgggacctctcaaccttctgttctagcaaatgtgcatgtttatatgaatcatgtcatgtccatatatccaatgttgaactatgttgcgaaaagtgatctcaagataatggtaattatcaaccccctccctaacaaggtgtagatctgcatttttttttcattgtaactcaactttgcctcatggtcaggaacagtggtttccagctctaaatgtactgattacagcgagatgtccgttttccctggaaatgtatttttaagttcttactggatgtatatgatgataatgttttctactatgaagatacctgaacagtgtccacactagagagtaagaaagagtaatgggcagattaaccctgtgcatccagacccaggaatcctctgatcctgccctccctgaaacggagacacagaggatggatgagcaatgctgagcggtgcacccaagaccacaaaaagaaagacatggaaatatgtcccctcccctcctcaagaaaggcagctcatcccctgttccctcaggcccgggcgaggagccaccccatgtctcttcccttcctcagtgtccacactgtggggtctgcactgatctgggcttcccttctcatcaccctcgtattagtggcccttgtgaatcaggtccagctgtggctgctgctcatggggctgctctcagtctgatctctctgtgtttgcagaagtcctgtgtgaagtttactgatggagtcagagggagaaagattgtacagcccagcggttcactcagccactcctgcaaagactctggatcaccttcactgattgcagcataagcttggtccagcaggctccaggaccagagttggcgtgggcagcaacagggagaaattcaagaggaagttcttacatgcacccttacgtgcacggtctcactgagatctttacttcctttatcacgtttgttctgtaaatcacaacgaatggtgcattcttcatctattatacacttgttaagtcttttttggcatcttttaaaaaactggtaactttatcctgtgtaatatccctgttaagtcctaaaagtcttttttgatgtctattttttcttaactttacacagctactatagatttattttggttcatatttttgtaatccatgttttctcatctttagtttttacatttgtgaatacgtacagtaattttctaatacatagcttctagttggggcttgctttttaaaatcaactataataagctctatttttaaactaatattatttttctgttacattgtttaaattagcatttcacaatgatgtttatttctctactaacatataatctaattcacttttataaatattatattggttaccataagttttacaataagaattgtatataattagattctataagaattgtatataattggattctaatgcagatactgtgatggccttgatatgaagaacagagacagtgtaactgtgtgctttgaattcctccttctcactgctctttcttgtttattcccagtttgcacttacatatactataaaacataatatataaattttttattcctttcatagttatataatatagcaattacaaagataaaaactgcacttcatcttgattttcccattttgtacagtcttaatttcttcgtatagatttatgttttgaatgtatatcacacggctactagcagagaaagtttgttaaaatgtgcactgaagcatgaatgtgctgacaataaattgtctcaagatctttttgtaatgacagaattttatttgcctttcacttttaatgaaaatgtaatgcacatagaattccagtttgcatttcacttgtaatttattttcttgtgtttattattttgttcatggagatgatcacacattacattctgctgggcctttattaaccacatttctatgaacctagtcagggttggatttcaagtgtatggttgccacggctatcagagttgaagtcagcttctcctgttcacaaaaagttcaggttcctccagtgatacccacttttgtgtcccggtttggctcttcccatttctttctccccagagagagcctgtctctttcatctgtggcaggtgcatcctgctgacacttttacttggtgattgtttgtggggtgaaagggcttggacacagggggatgttctccaaccttctgaccaagcatccttcttagctatgggtggtgagaatggctctgaagcatggtcttccaagcgttcctgttccttcccttccccaagtcagagtgtctctttctagccacagtggtcttccatcagtgtcctcagcttctgacccactgtccttactccacagactcaggatttcattcctcaggaaagagacgggaggtgtttctgggtagagtctccttagtgtcctctgtttccttctgttctagttgattctaccagtgcctgaaggacacaagatttaataaatgtctcccacatatcgtgaagagggattcagcattgaacggagctactgttcttcctccccagtcaacatcacaggacagcaggtggctgagttgtctggggatttctccaattctgtaggaaaagcccgcaagtgccaggagtttcacactctcacagcattagcacacacatcctcaacaactcatgaaacatttccaggttagctttttcctatcttcaataccatacaatgagtggcacctgccccaggtactctaataaatggacctagttttctctgcaggctccccattttctcagatttcaggggtttttttctctgcaacatcaactcagatatgttgaagggttcattttttgtagttcttcaagtttcttgttaatgaggtcagaagaagatcattttctcatttttttttttacattcccgtgcttagtatctgctttctaaataaaattcggaaactaagacaaaatatcaaatatccactatttggtgcattgttaaactatttgagaaatattcatgtactgaaatacaatgaacaattgaaatcaaggcatgcctcagtcacataagaatgtgaggacattatcaaataattgtgctgagtgaaggaagctaaagaattcacagtaaatctcctgtgatttcttttgtataaattgtagaaaatgcaactattctaaattaacatggagaagatctgaatttttctgagaaaagtgtggtgaggtaacaagatggtgaaataaaattacagagaagtgagagaaaaaaatttggaggttaatttaattgctaatagcacgattgaagtgctgattcaaaggctgcacacatataccaacattttccatatcgtacactataaatttgaattcactattgattgaatttttgaataaagcagtaacaaaaatgagtatattggctgaggaagagcaagaaagagatgaatattgacacttgaataatcacggactcctgaaaatacacacatgtgaacactgattgcatatttcaggtaaatactagaaaaagcaaagtcacataaagtcgttatgacaggtgggataccctgcaaatcacactaggcatgtcccacactgccctggagctgtctcaggggagcagtctcctccagtgtttagaggcacaggcacggataatagggctgacgctgtccagatgtgtgatattggacacattgcacaactgctctgttatgtatgtaattcatcttctctaaaaatgtaacattgacacttgcactgaatatattctgcaaatatgtaaacattaaataagatgatgactgctaattgatcatcaagtcacaatcacataatctgaagttatattttcctgagagataggattacctccagtgttttccgggaccctctcatctgctctgggcactgccctctcctccagcgtcccactagagcttgctatatagtaggagacatgcaaatagggccctccctctgctgataaaaaccagccgagcccagaccctgcagctctgggagaagagccccagccccagaattcccaggagtttccattcggtgatcagcactgaacacagaggactcaccatggagtttgggctgagctgggttttccttgttgctattataaaaggtgatttatggagaactagagacattgagtggacgtgagtgagataagcagtgaatatatgtggcagtttctgactaggttgtctctgtgtttgcaggtgtccagtgtcaggtgcagctggtggagtctgggggaggcttggtcaagcctggagggtccctgagactctcctgtgcagcctctggattcaccttcagtgactactacatgagctggatccgccaggctccagggaaggggctggagtgggtttcatacattagtagtagtggtagtaccatatactacgcagactctgtgaagggccgattcaccatctccagggacaacgccaagaactcactgtatctgcaaatgaacagcctgagagccgaggacacggccgtgtattactgtgcgagagacacagtgaggggaagtcagtgtgagcccagacacaaacctccctgcaggggtcccttgggaccaccagggggcgcccgggacactgagcacggggctgtctccagggcaggtgcaggtgctgctgagggctggcttcctgtcgcggtctggggcggcctcgtcgtcaaatttccccaggaacttctccagatttacaattctgtactaacatttgatgtctctaagtggaaaacgtttttgtcctttttgtttctttgtttttgtaacaagaggaaacatcctcagctccacagaagccagggtgtcactttggggacagaaataatcctttcatggtcaccaggataagagtcctgaggaatcccagggaaacctggagagtgttttccagttagactcagggcagagacctccatgggaatctctgattagaacaggccttgagctctgacgggagccaagagagaggctcgcccagggtcagagtccttaaaacctgatggttttcacagctatcccccctcgtcttgtaaactcagactgattcagttgaccctctttctgctaatccatttccttctctgtaggtttgattctcacagttcgctttcttcttctcttccctgaaaacagacgatgtgttttctgtagtcaaaatcccagggctcaggtctgcaggacctgggtaggctacggggactttctcactcaccattgtctggacactcttgtcttctgtgcatggaggcatttggaaaatgaagtggacattagccatgaagggaataatactagttttctccaataggatattgatgtagagctgatcttgtgcttctcacactgtctcagagtttggactttcacctgtgactttgagaagagctggggatgggcactccattgtgctgtgagctctgggtaacgataattgtagaatctgcctaggcagtctaaggtcaatactactggtcatcaggaaagacagctggaattcctgggaagatctgcatctgccgtccaccatggagtcccatcgtcttctgttatgctctctttgaatcagtcccacctagattatctagaacactcttcctgacttaggaaaaataatggcaggctccactaacacctgtgttatgccatgggagcaacacctaagctagtgtgtgaatgagtagatgagactgtggtctagtcaaggtgacaggtaaaattgattgttgccattatgatattttattttatatttggcaatatagtcatgctcctattataaatattttttgagacggagtcttgctctgttgccagcctggagagtgcagcagcacgatctcggctcactgcaacctcttccacctcccaggttcaagcagttctcctgcctcagcctcccgagaaactgggattacaggtgcacgccaccatgcctggctaatttttgtatttttagtatcgacagggtttcaccatgtgggccagtgtggtctcgatttcctgacctcgtgatctgcacacctcggcctcccaaagtgctgggattacaggcatgagccaccacacctggcctagttttattaatgtctgtccataccagcaactacatacctatggggacattaatttacatctgcagacagatgtgtaaatacacaagcctatacatacatgtgtagccatttatatttaacattataataaaataattctaaaatattttctaaagaattaaacttaatgatgagctaaatataaattagagtaatctataattgatttcgatcattctctatagtttgcataaatggatgtctatttctaagccttaacatagtgtattcgtcattttaaaacagtcaagaaaaaattacaaatgttcttgtcacaaaaaaagataaggatttgatgatttgaggtaatatatatgtcaattaacttgattcaattattctgtattgcattcacaaaccataacatacctttgtgccccataaatatatacaaccaaaatttctcaattttcaatgaaattttaattatatatttttaaatctgatgcctctccttggattaagccacctcctcaggcttacagggctcttccattttctcaacatgctgttataccagatgagcacaaacacattaatttcattatgcttagctttaatttttcaaaacaacatgaaggtgataattttaccaatagacgtattgcaacctactatgcatgagaccctttctgtgcttcaaggtttcttctcaggactttatatgtattgcaaattttcatttttttctgatatggaatgctgatttctctttattacagattatcagtttatttttcaaatttatctcttaaaattaattttttcaaagtcccactcaaaccagggtattattagaactttgaagtgtaatagttggaccaactttgagaatacattcaatttagttcacgtgctctcaagtatcttttcttctttaaaagttgttgtcagttgtaatatcacacaaaatattagtaatttatactaatgacacaggttaaaatattgtataaataatttaattacatttgattggaaaaaaggaatatatgttcctcatatcttgacttttttttcttctctatgagatgcatgtttattaattattaagtttaagatgttacccttgtctttttgatttctgggatttaattttagtacatatacttgaatgcattgtattaattcatataataatgttcatattttggatagggttttaatattaattttgttattactgaattttaaactattctacactttttcattttttgtttttatgcgataaaatttacatataagaaaatatgcatagatctggaatgtatcactagagagtttctggcaaatgtgaatacccttgtccccagcacctaaggtagctgaagagcaagtccatccccacatcgcgggtctttccctgtgcctgcggtcaactcctgcatggggaaatgttttgatttctcacactacagatccatttttttccgttttgaactttatataaatggaatcaaacattatagaccttttttttgaaaggggcttcgatatttttgagattaattcatgctatttaatgtataaaattagatcaacatattgtcatttattcaattcatggactgactctgatatgaaacctcaaagttttcatgtatatatggagacagggagaggaaggagaaagattttatatctgagtcagtccattaagtaaataaatgagaatattttgatttattttcctgttgatgtactttaaatttgtttccattttatgaatattataggcaaagccgttacaaatatattagtgtaggttttcctatattgtctcatttttgttgagaaaatatgaagtatatatttctttttttatttttgattactatttatttatattttatattttactttaagttctgggatacatgtgctgaacatgcaggcttcttacgtaagtatgcatgtgccgtggcggtttgctgcacctatcaacctgtcatctaggtttgaagcacctcatgcattaggtatttgtcctaatgctctccctcccctttcctaatgcttttcctcccctgacacatcccagtgtgtgatgttcccctccttgtgtccatgtgttctcattgttcaactcccacttatgagtgagaacatgtggtgtttggttttctgttcctgtgttagtttgccgaggatgatgatttccagcttcatccatgtccctgcaaaggacatggaaatcattcttttttatggctgcatagtagttcatggtgtacatatgccacattttttcatacagtctatcattgatggacatttgagttggttccatgtctttgctattgtaaatagtgctgcaataaacatacatgtgcatatgtctttatagtagaatgatttataatcctttgggtatatagccggtaacaggactgctgggtcaaatggtgtttctcgttctagatccttgaggaatttccacactgtcttccacaatggttgaactgatttacactccccctcaacagtgtaaaagtgttcctatttctccacattctcaccagcatctgttgtttccagactttttaatgatcaacactctaactggcatgagatggtgtctcattgtgattttcatttgcatttctctaatgaccagtgataatgagctttttttcatatgtttgttagctgcataaatgtctttttttgagaagtgtctgttcatgtccttcgctcactttttgatggggttgttttttttttgtaaatttgtttaagttccttgtagattctggatattagacctttgtcagatggatagattgcaaaaattttctcccattctgtaggttgcctgttcattctgatgatagtttcttttgctgagcagaagctctttggtttaattagatcccatttgtcagttttggcttttgtcgtaattgctttggtgttttagtcatgaagcctttgcccatgcctatgtcctgaatgatactgcctatgttttcttctagggtttttgtggttttagattttacatttaagtctttaatgcatctagagttaatttttgtataaggtataaggaagggatccagtttcagttttctccatatggctacccagttttcccagcaccatttattaaatagggatcatttccccatcgcttgtttttgtcaggtttgttgaagatcagatggttgtagatgtgtggtgttatttctgaggcctctgctctgttccattggtctatataactgttttggcaccactaccatgctgtttttgttactgtagccttatagtataatttgaagtcaggtagcatgatgccttcagctttgttctttttgcttaggactatcttggctatacaggctgtttttagttccatatgaagtttaaggtagttttttctggctctgtgaagaaagtcaatggtagcttgatgggaatagcattgattgtataaattactttgggcactatggtcattttcacaatattgattcttcctatccatgagcatggtatttatttattataaaagtaactttaattttttcagttttaatgaggaacaattgaaatatttttaaatgtatatgtttaaggtgcaccacttcatgttttgatattgtgttagtccattctcacactgctataaagaaatgcctgagactgagtaatgtgaaacaaaaaaatagatgtttaattggctcatttttctgcagactgtacaggaagtgtagtggcttctccttctggtgagactcaggaaagttagaatcatagcagaagacaaatagtagtagacacatcacatggccagagcaggggccacaggaagagagggaggtctacacagttagacaaccagatcttatgataactcacacaatattatgagaacagcgccaagagtcagtgctaaaccattcatgaaagacccaccccatgacccaagcatctcccactgggtcccagcttcaggattgaggattataatacaacacgagattcaggccaggacgagttgcaaactgtatcagatacacattgtaaaatgctcatcatgatcaaggtaatttgtgtgcctatcatcccacatacattttttttttaaatggagtgtgtgtgtgtgtgtgtgtgtgtgtgtgtgtgtgatgagaatatctaagatctaccctttcagcaaaaatcacttttacaacacagtattaaatacaggaacattgctgtagattagatctccagaactcattcaacctgcacacctgaaattctgtaccctttaaacatcacccaatttccctctcctcccacatcctgggacccattattttactttctgctttcaagagcttgggtgttttagataccacatgtaaatgagataatgcagcatttgtctttctgcatctggcttattccacttagcatcatgtcctccaggcccatccgtgttgttgcaaatgtcagaatttccttcttttcaaagcctaataaaattcagttttatgtgtacacattttctttatacattcatcagtctgtggtcattaaattattttacaaatctacactattataaataaccttgcaatcagcatgtgtttaacataataattttacttatttgaatacataacaagaagtgggatcaccagatgatatgatagctttatttttcaatttattgagtaaccaatcctaccacaccctaaaaggattctcttttcaccacattcttgccaatatgtgttatatgtcttgctgatgatagccattttaagcagagtgaggtgataactcatcatgattttgatttgaattcctctgataattagtaatgttgagaaccctttgaggctctgtttttcatgtgtgtgttttctgaagaaaaacctatccagtttttgccctttttatcagatcatttgttatttgctattgagttgcatgagttatttatacttttggatagaacttatgtcaggtatataattgcacatagtttttttcctgtgcttttttctattaaattcaaagaaatcatttctgaatcaatgacaggaagtttttttccatgtgttctatgagtttgtggcttcaggttatgttcatttttagtttatttttgaatacggtgttagagaaggtctaattttatttcttttgcatatggatgttaagcttttacatcatatattgaggagactgtccatccttcactgtgtgttcttgggatacaaaatcaggaagatgcataatttaaaaagaaaacatcagatgaatattcctggtgaatatagaccgaaaagttctcaacaaaatactagcaaatagaatccagaagcactttaaaatgtaatacctcatgatcaagtaggctttacccctggaaggcaaggttcattcaacatccacaattcagtaactgtgattcaccatgtaagcagaataaaagcaaaaaccatatgattatctcaatagatgctgagaaagcttttgataggatccaacatccgctcataataaaagccctcaacagactaggcatcaaaaaaacttacctcgaaataataagagccatctatgaccaatccacagtcaacattatactgagtgagcaaaagctcaaaaccctttagaagtgaaagaagaccaagatgccctctcaccactgctattgaacatagtactagaaaccctagtcagagcaaccaagcaatatcaaaataaaaggcagctgatatggtttgtacttgtgtccccactcaaattaaatgtcaaattgtaatacgcagtgttgagggtggggcctgatgaaaggtggttagatcatggggatgagtctctctctcgtgctgatcccatgatagagccctcaggagatctggtttcaaagtacgtggcacctccctcgtctttcttcctcctgctccagccaggtaggacatgatgcttccctttctgtactgattgtcaggatcctgaggcctccccagccatgcttcctgtatagcctgaagaaccatgaaacaattaaaaatctttataaattacacagtctcaggtgtttctttatagtttgcgaatggactaatacagaatccaaataggaaaagaagaactcaatgtatctctccaaactgatgatataattctatacctagaaaattctaaagaccctgccaaaataattctagaatagataaacaattttggtaaagtgttgggatacaaaatcaatgtacaaaaatcactagcatttctataccccaactatgtccaagctgagactgaaatcaagaacacaatcctatcccacttacaatattcacacacacaaaatatgaaatgcctggaaatacaggtaacaaacaaggtgaaggatctctgcaaggagaactacaaaatacagcagaaataaataaataaatcgtacatgacacatgactcatctgacaaagggctaatatccagaatctacaatgaacttaaacaaatttacaagaaaaacaaacaaccccatcaaaaagcgggcaaaggatatgaatagacacttctcaaaagaagacatttatggagccaacagacacatgaaaaaatgctcatcatcactggccatcagaggaatgcaaatcaaaaccacaatgagataccatctcacaccagctagaatggcgatcattaaaaagtcagggaacaacaggcgctggaggggatgtggagaaataggaacacttttacactgctggtgggactgtaaactagttcaaccattgtggaagacagtgtggcgatcctcaaggatctagaactagaaataccatttgacccagcagtcccattacttgctatatacccaaaggattataaatcatgctgctataaagacacatgcacacttatgtttattgtgtcactattgacaatagcaaagacttggagccagcccaaatgtccaccagtgatagactggattaagaaaatgtggcacatatacaccatggaatactatgcagccataaaaaaggatgagttcatgtcctttgtagggacatggatgaaaatggaaaccatcattctgtgcaaactatcacaaggacagaaaaccaaacactgcatgttctcattcataggtgggaactgaacagtgagaacatttggactcaaggtggggaacatcacacaccggggcccgtcatggggtcgtgggagtggggagggatagcattaggagatatacctaatgtaatgttaatgggtgcagcacaccaacatagcacatgtatacatatgtagcaaacctgcacattgtgcacatggaccctagaacttaaagtattatttaaaaagaaagaaaaaaactattaatttttctgaaccatgaacatggaatatttcagatatattttcaatttgtgtgtgttcactttattttttattatcaatcatttctggttttcttttagaaatctttcacttatttggtaatatgaaatataatttttagctattataaacaaaatgctttattgattttttgctgtttgcatttagcaatgccaccaatttttgtatgtaggtgttgtattctgcaaatttacagaattttttatcaattataacagtttttccagcaccatttattaaatagggaatcgtttccccatttcttgtttttgtcaggtttgtcaaagatcagatggtcgtagatatgcagcattatttctgagggctctgttctgttccattggtctatatctctgttttggtaccagtaccatgctgttttggttactgtagccttgtagcatagcttgaagtcaggtagcgtgatgcctccatctttgttgttttggcttaggattgagttggcaatgcaggctcttttttgttccatatgaactttaaagtagttttttccaattctgtgaagaaagtcattgatggggatggcatcgaatctataaattaccttgggcagtatggccattttcacgatattgattcttgctacccatgagcatggaatgttcttccatttctttgtgtcctcttttatttcattgagcagtggtttgtagttctccttgaagaggtccttcacatcccttgtaagttggattcctaggtgttttattctctttgaagcaattgtgaatgggagttcactcatgatttggctctctgtttgtctgttattggtgtataagaatgctagtgatttttgcacactgattttgtaccctgagacttcactgatgttgcctattagcttagggagatttggggctgagacaatggggttttctagatatacaatcatgtcatctgcaaacagggacaatttgacttcctcttttcctaatcgaataccctttatttccttctcctgcctgattgccctggccagaatatgtagaaagctgaaactggatcccttccttgcaccttatacaaaaattaattcaagatggattaaagacttaaatgttagatctaaaaccataaaaaccctagaagaaaacctaagcaataccattcaggacataggcatgggcaaggacttcatgtctaaaacagcaaaagcaatggcaacaaaagccaaaattgacaaatgggatctaattaagctaaagagcttctgcacagcaaaagaaactatcatcagagtgaacaggcaaccaacagaatgggagaaaacttttgcgatctactcatctgacaaagggctaatatccagaatctacaatgaactcaaacaaatttacaagaaaaaaacaaacaaccccatcaaaaagtgggtgaaggatatgaacagacacttctcaaaagaagacatttatgcagccaacagacacatgaaaaaatgctcatcatcactggccatcagagaaatgcaaatcaaaaccacaatgagataccatctcacaccagttgggatggcgatcattaaaaagtcagggaacaacaggcgctggagaggatatggagaaataggaacacttttacactgttggtgggactgtaaactagttcaaccattgtggaagacagtgtggcgatcctcaaggatctagaactagaaataccatttgacccagcagtcccattacttgctatatacccaaaggattataaatcatgctgctataaagacacatgcacacttatgtttattgtgtcactattgacaatagcaaagacttggagccaacccaaatgtccaccagtgatagactggattaagaaaatgtggcacatatacaccatggaatactatgcagccataaaaaaggatgagttcatgtcctttgtggggacatggatgaaaatggaaaccatcattctgtgcaaactatcacaaggacagaaaaccaaacactgcatgttctcattcataggtgggaactgaacaatgagaacatttggtctcaaggtggggaacatcacacaccggggcccgtcatggggtcgtgggagtggggagggatagcattaggagatatacctaatggtaaatgacaagttaataggtgcagcacaccaacgtggcacacgtatacatatgtaactaacctgcacattgtgcacatgtaccctaaaacttaaagtataataaaaaaaagaaaaaagagacccaattgttgacaaagttatgaaaaagatagtttttaaggagtctttaagtaatattgtattttctgcaaacagacaatttgatttcccctattccaaatttcaggacatttcttcttttttcttgtcaaattgttctggctagaattacagtaccatgtagaagtggtggaaaagagcatttttgtcttgttcaacatcttagagaaaaggctttcagtttttccagccttggtataatgcaagctgtgggtttcacatatctggactttattattttgagatatgtttcttgtataccaagtttgttgagaatttctataaggaatggaggttgaatttttttctatgactttcttaaagcaattaatcataaaataataataagcaggtcaatacaagatccataaattagtggaagctagttatttgcactgctgccatagagtaggatcactacacaactcatggtgttgatgggaaactataattctgcaataattaaagactagtgatttacactgggctctattgagagatttggttgtcaactacagaaatcgagatgaaggggcactgagaaacatttcgcttcatatcatctcaacttctaatatcaatttttagtactaatacagtcctattttctcagtatactgtctcacaggttatagtatatgtcttagaaaattaagggttgtttcattctaataattaactcagaaaaattcatttcctattatggatgacaagtgtaaattcatatcttaataattacccacactccaaaacactactacaggcaaaggcaagagaaaggcaggtatagatgagattctctgaggtcagttatgtaaatacccaaggactattgtctatgaccttgaatgtcactttcttcccttccatgagctacatccaggatattctgtgaatctgagagcgttgagcatgtttaattattttatctcactgccccttagtcttgctttctccagttgacaaccaaatctctcaacaataggcccagcgtaaatcaccagacttcaattattgtagaactatggtttcccaacaacattatgagttacaaaatgatactactttatggcagcagtgaaaatgatgaacttccactaacttatgaatctctgaatggctagcatggaggtgtgtatgtatcagcgcactgttctagaaatgttccgtttctgtccattattttatgtagtaatgaggacaacgtgaactaaagggagtatccatggccttataagcacagagaccacatccagtgcaggtgcagagcaaggctgcaacagtcagcaagttgctctctgaagagtcttccaattcccttgcccaaagcatctgctcattcatgggctgagaaaagggaagtcatgcatgcagtctactctctctacagagctgacaggggacacggacaacatcgattattcatggaattttcccataggaatgcagctgtgtgcacacacacataatacatttttaaatgttttttttatttatcctctccaattttaaaaaagtcatcaccttttctcctaatcaaagaggattttgaccagaatgcttggtgggagccccctgctctcccagatgcccacccttatttctcttgaagtgaagaacggcagctctcttgatttctactctcatcctctaggactaaaaccagaaggttccacgccccctgggtgaacatccaagaagaccctgtctgtagcagcaggagcctcaagccttgactgagagctatggtcctgaaatgagacagtgtcccccatggagagcacacgtggacgcccacaactgagggctcactgctcttcaccacagatgcgctcccttactgagtcctgagacctgagtgcaccccatagggtagggctcagaagaggggatgcaaatctccaccagctccacccttctctgtgttgaaaagccgagcatggggacctagttcagtgactcctgtgccccaccacatggagctttactccacgcttctcctgctgactgtcccttcctgtgagttcagtggtcagggaatccttcaggggtgaaacacctgttcttttctttgtgggcttcatcttcttatgctttctccacaggggtcttatcccaggtcaccttgaaggagtctggtcctgcactggtgaaacccacacagaccctcatgctgacctgcaccttctctgggttctcactcagcacttctggaatgggtgtgggttagatctgtcagccctcagcaaaggccctggagtggcttgcacacatttattagaatgataataaatactacagcccatctctgaagagtaggctcattatctccaaggacacctccaagaatgaagtggttctaacagtgatcaacatggacattgtggacacagccacacattactgtgcaaggagaccacagagacagagcccagggtgcctcttgtacaagaacccaggctgcttctcagtggcgctccctccccacctctgcagaacaggaaagtgtggctgagatgccatttcctgtcagggtctgggtgtcttatcctatctgactcagagccttgtcttcctccctcttctttagtaataaatggcatgacccctgttagtggttcatgcaagcagaggctgtatcctgtttgacaaagattcagcatgaaaggttcctgttacttgagccagatgcatcactgatatgtggccaccagtttcttagactcataccactttaagggaccaaatacaaatgtccatagcatatgccattcttaaactgcagaaatgatgtcaaagaagaatgtggagataagagagcaggaggaattatgaaaatctggatagcatcttctcttctagggtggaaggtatgctagtaaagtaatttaatgaaacaatcagacagatgcaatatgtcctcatcatggagtgtctcacatgggcagtgcacaaataaatttctaaaaattccataaggtagatgtgatggatgaggcttatttccacacagggagcccacaaatatccagagaagtaaaaaatctgacacttggaaagaaaattgcctcatcttgacatcagaaacccatttcaacatgtccgaggggcaatgtggaaaagaaatggaaacttcaaaaacacatttcttatgaaatgtctagctcatgtttgaacataaaaacagaattgtccatgattttagaaaaaccaacccatgacagcgagtcactacactcagaaacaccactgagtcaacagacttcagtctgtgagcaggtcagtactgaggccccaggtgaatcaaggctctcacgtacattgtacagaacccagaattgagccacacaatctataaccaagtcttctttgacaaactttacaaaaattaacaaaaaaatacaccagagaaattcaatatatgaaattcaatatacccattcaatatatggtgctggggaaattggttagccacgtgcagaagaacaaaactagacccccaccctcaacacatatatactcaacacaaaatgaattaaagacttacatataagacctcaaactataaatctactcaaacaaaacaccaggacaactcttctgggctttggcctaggtaaagaatttatgactaagaccccaaaagcaaatccaagaaaaaaatagacaaatgggacttaattaacctaaagcatttttcacagcaccggagtgaacagacaagttgcagagcgaaagaaaatttttccacaccacacctgtgacagggaactaatatgaagaatttgcaaggaactcaaactactctacaacaacaacagcaacaagaaccaaataactccgttaaaattagcagaggacatgagtagacattttcaaaagaacacataaaaatggataataaatatataaactacgctcaacatcactcatcatcagggaaatgcaaattaaaaccacaataagatatcatcttccaccagtcacaatgactattactaaaaactcaaaaatatcagatgttggtgaagatggaaaggaaagggaactcttagacactgttgatgaggatgtggatgaggacaacttctatggaaaatggtatggagatttcccaaaaaactagaaatagaactcccctttgatccagcaatcccactactgggtttactacccaaaggaaaataattttttatttccaaaagatatccacacttctatgtttatcacaaaactattatcaacagcacatatgtcaacctgagtgtccaccaacagatgattttataaaagaatatagcatatatgcacaattcaatactagtcagccacaataaggaatgaaactgtcttttgcagcaatatgcatagaactggaagacaacataattagtgacctaactcacaaacagagagtcacatgtcacatgttattatttataagtggaaggtaacaacgtgtccacaaggatatggagagagaaatgatggacaccagagacttagaaggatgggaggtggaaggtgggagcatgaggagacattacctagtgggtacaatgtacattatttgggtgatagtacactaaaagccaagaccactatggaatatagccatgtccaaaagtggcattcgtagtccttaagtttatacaagtaaatgtacacacaaataaaattaaaaatataaaataattaacagttgaccaatgatcttaaaagttgatttaaaatataatcaataaatgaaatgaatatcagttgaacctcattaaatttgaaaacgttttatactcaaatgactataagaaaatgaatgtcaagtttcagatgagaaactgtttgcaaatcattagccaccaacataagtataataagaaccctcagaactcaactgtgaaaaaaagaaacaacccatggatagaataggcaaaggtttgtgcagacatttcatcaaataagatgtacagatgacacataggcatataaatgggctcgcaacaggattttccattcgaaaaattcaaatcaagccgacagtgagacactactatacaatttttagaaattaagaagaaatacagataataccaatgctggtgagcatatcagggtccaagactctaaaacgttgcaaacaggaatgcaaaatgaaactgctactcaggaaaataatttatagttttttctaaaatcaaacattttcttaatatatgacctaaatatcccactcctgaatatttgtgtcagagaaatacaatcttagattcacaacaaacttccatttaaatgttcaatatattgtgctcacgtgtgtgtgtgcacgatagaaacaaaaagtaacatgaatgtctcaaaatttgaataggtaaaaagtaggaagtgtctattaattgaataccatcagcaataaaaaataacaaaatgactgatacacaaaccattacaggtgaactccagacatgatgctaagtgagagaagccagtctcaatgatcaaagggacacatctgtaagcaccacggtcatcctcaggtgtcagtggtttgggctgggctctctgtctctttcctgaccagacccagatgttgagctccgccacttgcagatggaaaattctactattttcaacaatgcactgaggtttgaactgcttcacagactgaacgaaacaaacacgggctcctttgaacagtgtgcagcatttgttccaaccacaagagaatgtctcccagctctgccccttctcagttttccctgcaagccagcagccctgcagtttagcctgcatctcccatgcatgcacccatctccttccaagggccttactccacaacctccacttattttgagtgcactgactggctttgaacttttccacattctgttgttattgaagttaggatgtttagagccatattaaggatcatattttatgactgaattccagtgccccctctctcctgggacagagcacgtaaccaacattctgcatgtggagacaaagatgagcttttttcttcctcagcctaggagatgagcgctcagtggagggttggatagaagcttcccaccttctcagcactccagttctggtggggagaacctctgccataggagcagagctagaaaccagggaccgaatgttcccagtgacactggacccagggtagagcctccatccacgagtggggctccatggaagaagcgagtctctggctctcagtagcttttgtccagaactgagccttaggatcgtgtactgtgggcagagtcagagggccaatgtcctggctcctggggaacagtttcctctgaagggagctgggtagaaggtgtcctgtcttcttggctacatctgtttgcagtggagtttacatcatgctgagttgggatgtggaaggaaggaggagcatcttagatcaattatgatggctagacttactgaattttgtagattttcttgaataaatgtttcttcacttgctgtatgctgtgagagcctttccaaaccctgtattttttcaaaataattttcactggtctcatgagggcatggattcattgagcccctcatgctatcaaagagaaatagaactttttttgttcactttttagagaacatccatgggttataaaacaatgggttgacttctcttccaaaactttacagataccgtcaattttcctcttgcttgtaaggttttatccagaagaatgctgtcatcattttttctgcttttttggaaggaatgccccttctactcacctcaaattgcctgcatgtatttctatttttctttggttttcagcagttttaataagatttagctaaatgtgtgtggggggagcagggagtgtcattctgctgttctgtgttctctgagatgcatggattcacggtttactctgtctccattttggggaacacaattagaaaaaatgtcagtgtgagcccagaaacaagcctccctgaagtgggcagaggaccacctgggggcgctcaggacccactgagcacaagagccagccccagggcaggtgcagacgggggttaagatctggtttcccgtcagccctgtggcttcctctccataaaacagttccctcgggggcacgtctctggattccttatcttgttcttactgtgaagtctctgaagaataaacatttgttgtaacaagagaaaaattttctcccatgcaccaaaggcagagtcacctacagtcaattagtcctgtttctcaatgttaataaactatcaatgtttctgaaggtacattgtacagaacccagaattcagccacacaatgtatagccaagtgatattgacaaacttaacaaaatatacaccagggaaaggacgtcccattcaataaatggtacttgggaaaatggatagaaacatgcagaagaacaaaactagatccccaccctcaacacattagtcaggtctctaaaatgcaggagtacatatctaaaatttattattttattgtgcatttttacgtgttccagaaggtgggagaaatttctttctgtgaagagcatcccaaagtcaggcactcctctagaacacgtgtttaatccttgtctttggcttattgatgagctctgttggctgcaataacttctgccatccgggctgactttgcatcatgtagaggagcaaattctgaatgaaagtttgcactactcaattgagtgcataacctacagttttgttactgatgtatgattcatcagagatgatatcagatcaaggatttcaatgagaatctaatctaaaagatgtaaacaaattttcctaatttagataaaattactgtgagcacactgctagtattcagccatgtctcctatcacattgaatctacactaagtttgacctaaaagctagcacttgttctcatgttccaatatgttatttttattttaatgtattcagattactatgtgttgctattttacccaaagtgaaggaaagcaattttaactgactgaaaatgagaaaaagcacaacctaatgaaatggaagtcaggacatgagtgtctccagccttgtctatttcaaaaattcacgtacgcagggggatttctttcctcaattttacacagagaaacttccaaaatgtttgtttcctctcccatggactctatcatcagtttctatgtcagtttgcttagaattttggcctccagctccaaccaatttggtgcaaaaacatgatttcattcttttttatagctgcagagtattgcactgtgtataagtaccatgttttctttatgcagtctataactgatgggcgtctaggttgattccctgtattaggtaatgtgaattgcacagagataaacacatgagtggatgtgtctttgtgttacaatgattggttttctcttgggcatatacccagtaatgagattgctgaggggaatagtagctctgttttaagttctttgagaaatctctagactgactgaattgttttctctgtgaatggtgataattatgtcaatatttgtcaaattttgaatgtattgtttgaagattgttatttgtcaatattacctcattaaaactattaaaaatggaagtgtataatttggtagaaaaggattaaaagaaagataaaaataatacaagaaaagtcacagactcctgaatccacatgtgaattagcactcagtttttctatattatttataaaaacactaagatacagccaaataatatcatgatatccttataagaagagtgtttcgtaaacctcactgggaatttctagctctgtcctagagttaatttagggagcagtcggatccagtcctgagcaacacaggccagacactgagacttaccacatcttaccagatgtgagctcttagacacgtcacatggcctctccatgcttgggggtttaccttcacatctgtaaatgaaggaaacattgactgccacagaacatacttcatgtgcatctatacagtagaaatgctaataagaattaattgtttatgaagtgtaatcactctgggacacagcccactcagaggcatcccttccagaacccgctatatagtaggagacatgcaaatagggccctccctctgctgatgaaaaccagcccagccctgaccctgcagctctgggagaggagccccagccctgagattcccaggtgtttccattcagtgatcagcactgaacacagaggactcaccatggagttgggactgagctggattttccttttggctattttaaaaggtgattcatggagaaatagagagattgagtgtgagtggacatgagtggatttgtgtggcagtttctgaccttggtgtctctgtgtttgcaggtgtccagtgtgaagtgcagctggtggagtctgggggaggcttggtacagcctggcaggtccctgagactctcctgtgcagcctctggattcacctttgatgattatgccatgcactgggtccggcaagctccagggaagggcctggagtgggtctcaggtattagttggaatagtggtagcataggctatgcggactctgtgaagggccgattcaccatctccagagacaacgccaagaactccctgtatctgcaaatgaacagtctgagagctgaggacacggccttgtattactgtgcaaaagatacacagtgaggggaagtcagcgagagcccagacaaaaacctcctgcaggaagacaggaggggcctgggctgcagagggcactcaagacacactgaaaacacggttaacactgggacaagttgctcaggaaggttaagggctggtttcctttcagagtctttgctgtttctgtatctaacagtttccccaggaaccctgtctagatttgcgatcttgatctgcttaaactgtctctgtgtcatttttcttacctgtgactttaggggagctgatcgtggacactccagtgtgtggagatttcctggtgacagcaattgtgtgttctgtctaagcatgtctagggccggtcatcaggaaggacaggaaggacaggctggaattcttggaaacagctgcacctgccatccaccagggaactttattgtcttctgttctgctaaaattaaatcaggcacaccaagtttaactagcactatcttcctagcttaagaaaattgatggcaggtttcaataacacctatattaaaccttcagagcaacacctacattagtgtctgatttgataattgagactatgttctagccaagcagacacataaaactggtgattgccatgcttagttcatatttcatatttatcaatagaatctggctggtgttataaacagatttgccaacacatgtgtgttagtgtttgtcttcggagaggcacattctatgactggattaagtttgtgtacaggttcctaaggaacctgttcatgcttttgagaggaaatgcagagggggtggaaggcggctggggaagctgaaggtatacgagggaagtcagtccctgagtgaaggagagagggaggagaactgggtagaactttcctaaacttctgtgctggtctaggaaggtccagcaagatcactgagtcagattcgtgtcaaagtttcccatcggggacccccgtgactcccagcagtggctctgctcagatcagcacagagctcgttcttctcctgagagtggagcagaggatgtggctccagcaccagccatggcatggacgtcagagagcagccccaggcacctgagtcgggtgcattgtgccccctgcaggtggacggagggaggtgctgactcagggcccacacgctgtgggttctatacagaacacacacttttacttcatttctgtggatgacatagaaacaaacatgcagtctattaacagcggtgattcctacatttgccccaattgctttattccttgattccgcagaatatcctgacgcagaattgtctttctctcgtggaattgcgacgtgtttaggacgtgtgttccccactttcagtgttctgctccatgaacagagatcctgagtagagtacagctgaccctccttccacactgttcctctcctccccacaggaagagcagataattacctgaggctgaatctgaggtgggatctgtcctctgaacctcagagcctgcagagacccccggctgcagattcatggagtcaggtgtttgtacatgtgggaaacttgagctgttcttttgtcagtgaacactccttagaactaattgtgggttcagaattaggacacccattgatctatcacacctcagctcattctgccactcagaatctccagaaattcaggaaatggttcaatttacatgtttgtgacacattgttctcatttcatttagttgtgagtttggtcagcaaaagtgctaccatttatgtgtcccaacctgatgaagctaacttgcttcaccagatgttgggagctcctgaattttatcctaagcccctctctctccacttcatgtgaaattcggtttgacctggaattctggtgtgttgatttagccagatttccccatactgagtgtctgattttcctggatatctgatcagtttccttgtccttcaccataacttgggtgacatctgatcaccctgggctaacttcaacaaaaatcctggcaggttgccttaagcaggatttacctcactcctgatgtttcttcttgattttccatcctttgccccaaccctgctgcatgcctataaatccccacgttctcactctgtatttggagttctgctgaatctctccctcattgcaaaatcccactgccctggtccctacacctatcatgagggccctggataaagtcttccttactgtgctgtagaaagtgtctttgtatatacattttttctttaacaaatctgcctttagtatttcctaattgatcaaggaacctcaaacattgaatgaaagtgaggttttccattttactaacatatgtgtatctgtgaatttcaatttcaatgtgtggtgtccagaagtcctgagcaccaacagttgtgcttctctgtccaattatttgattctgaaacctgggagtcatcccaacacaggtaaatatgtgattttttttttttttttggtttttactgtttagtgactgacttatttcacttacactgaagcttcatgaacacaatgatgaaaagtagagagaggacttgtttgaaaatgccagatttatggtagactttaccacccacgtgtgtctggaggtcttcttaaggttccaagaacaggacatttttcccacaacaagacaaggatgagaacctctgagctgtgaggatggaggacaggcagggccatgtgtggacaaggacgggctgctgctatgtccagggtgttctctactagcaaccactccatctccttcctcactctgtggtatttgtcagatgggaaacatgcctagaatttatctttgacatctggatggaagcccaggcaagaggcatttgacagcttattcgtgagcctacttctttaaggaatgccagatcccttgctctccttcctagttcttaacccctttaactcccttcccctcctgcacccatccactgcctatttacagccacgtccccacacccttcactgtagcaccattttcttgggctcctgggaaacacaacagctttggtttaactcacagctcaggcacactcacgggtcctttcagaggctctcaacttccctcctacagtccctcagctcctcctggggtcctaacttggccatctctatcctctctgctgagcctggccatacacaatccatcccatctggatatgtgtatagcagtgggttaactcagcaggcatgaatagttcaaaccctccacgttcctaaaaaggtaaataactaaaaaataaaaacaaaagtaaacctttgttcatttatggctgtctgttacctcctgggatgagatctccgagtccatgaaatcttacacctgataaaagtgtctgcagatgtctgcagccttgggacatgctgtacgagtttaatcacagtgatttatagtgaacgcctgcttttgttttgctggggagggctgtggtctgagtattgtggtcagttacccaggtgttccatagtctatgattcattccccaaacacagccctggacaagaaaactcaggggcactcccctgggtgttgacacttcacacatgtcatcttacctcatagctggagcattacacatgtgcagaaggctccacagtgggaggacccctgagagcttgtgcctggattctcctgagcttcactctttgtgccttttttttccatgtattttcaattgtatcattttgctgtaataaactgttcctgtgaatacgagttttcatgagtcctgtgtttttactgagttttgagcctgagggtggcagatgcaacttctcaatgcagttgtatcagaagaaggatttcctagagagatcctaagtgacacatggctgaagtattgttcagaaaacataagtattcaggtgtggaatggcaaaatctgatacttgggtggcaacagaattacccggtctgagacagcagctgaactgaagtagatgtctggagataaatgcaatttagaaacgataactcatactcccaaagagctggctcaatcgatacataaggaaaaataaaatgataaaaaataacctaaatatgcaattactatttgtgagaacatccgggagagtgattgcagggaaagtggcctgcgccgacctcagattttggccaatgtcatttctggctgatgggctccagggcactacctaagggagcaattatgctgcaatgacagacagaagcttcgcaagctctctccacccagaaggtggttcaggtggtgaagtgcggggactggtgagccacaaaacactgaaatgagggaggaaagtgagaaagtgaaaggcttttgagctttttctttagcttaataatttttgttaattattaacaaaataattggacaatgactaatgtaaaagtggaccgtgttttgagtcccttagaacggaggagaatgcagcggtcaatgttgtgcccagagattactatagaacaatagtaggtggttgaacatgctccaaacacaaagcctcttgttgctgatgggacagctgccctcgtctactgcacaacagcttctccaaagtgtgtttaccctgagcattgagattgcctttctcttgtaagtgaaaaaatcggaaaactccaaataaaggaggagttgtaacgctctatgtgtaagaaattctaatgtggatttatgataactgggatatgcatccacttatctttttatctgtaaaaattcatgggtgaaagtgcaattttgttacatggatatattgttcagtgatgaagtctgggctttgaggagagtcatcatctggatggtgtatattgtacccagcaagtaatttctcatcccacacaccactcccaccatccaaaccttccaagtttccaatatttattatgccacactctatattcatgtgtgcacattatttagttcttacttatatatgacatgtggtattcaactttattcttctgagttatttaacttaagatagcagcctacagtttcatccatgatactgtaaaatacataatttcattttttattattgagtagtaattaaatgtgtgtatatatattcacaaatatatataatgtatttgtgagggtgtgtatgtgtgtatatatgtgcatatatacatatacaacatgttttctttatccaatcattcattaaaaacacttagtttggtaccgcatatgtgctattgtgaataaggcaacagcaaacataaatgcagcatctatcgaatataaaattcatttttctttgagtcgataccaagtagtggatttgccgaattaaatattagttccatttaataagagaacttaccaacatctgtttcttgtttagtttagtttttatttttgactttttaataatagttattctgactggtttaatatggcttctcgttttgacttcaaattgcatttctgtgatgattaatgacattgattgttttttcatatcctggttgatgatttttatggcctcttttgaaaaataaatgtctgatatttgctcactttttaatgtggctatttgtgctttttgtgttgctttagtttcttgtagattccaaatattagctctttgtcagatgtagtgtttaaaaatatttttcgtcattctgtaggttttctgttaactttgttgattatttattttgctgatcagatgttttgcttcttatttgtattaagtccaaataacctattttggtttagttgtgtttacttttaaggtcatagtcatgaattctttgcctagcacaatgttcagaaaaacacttcctaggatttcatttatgactttcagactctcaggcctcccagtcaagtcttttatccatattggtgtaatgtttgtatgtagtgagacatatgggtccagttttattcttctgcaaatagctgttcagtttttcctgcacaatttattgaacaaggtgacattttcccagggtatgctttttgtctggttggtcacagtcagttggctgcaggcacatgactgtatttctggaatgtctattctgttccaagtatctatggttctctggttgattgttacttgtgtataaaaatcctactggcttttgtatgcttttttatcctttattctaaaacttcactgaattaattcatcaattctaggagtacttctaaagaatattagtttttaagtacaaaatcatattgtcagcaaacacacacaaaaaactgacttcttcttttccaatttgggtgcctttatttctttctggtgtcttatttctctggctaggatttcaagttctatattgattaagagtggtgaaagtgggcatccttgacgtgttctgagtcttaggaggaatactttcaacatattgctactcagtataatgttgtatgtgagtttgtcatatatgatttttattaatttgaggtatgttttccttctattctaattttgttgagggttttttatcataaagaaatcctaaatgttatcaaatttttttttctggacctattgacatgattatatgttttttgtttatgtggtggatcacagttattgagacatgaacgttgaactatccttgcatccctgaaatgaaacttagcagattgtagcatattatctttttgatatgtagttggacttgattttcttgtgtcttgttgaggatttttccatctatagtcatcagtgatattgatctgtagtattcatttttgggtccttgcatggatgtggtatcaggctattagtggctttgtagaatgagttagggagaaaaaccctctcctcgtttttttggaaaaagtttcagtagaattactagcagatctttttgtatattggacagaattcaccttttaaaataatatgctttacggctttgatgttgagatttttttaaattactgcttcgatgtcactaatttttgttggtcctttcaggatttttatttcttcctatttcaatcttgggagattatatatttccagacatttatctattcaccctaaattttctagtttatgagcctggagatgttcatagtagactatgttgatcattatatttctatggcatcagttgtaatcttttcttttttgtttctcattctgcttatttaaattgtctgtctactttacttgcctaatctagctagtggtctgtaagttttgtttatcatctcaaaaacccaatgttttattgtattggttctttgtatttcttggttcttaactttatctagttctgctctggtctttgttatttgttttcttctgctgtgtgtttggtttgatgttgtttttctagttatttgatacgtaatgttaggttgttaatttgtgatctttctttttgatgtggtcatttaacattataatcttatcccttagcacagcttttgctgtaaaccagaggttttggtatgctgtttctctatttttattcatttcacaacatgttacaatctttttaaattttatcattgacccaaagttcattcagttgcaggttgttaaattttcattgtgtgtgtagtcttgaatattcttctagggtttgatttctggctttatattactgtggtctgagaagatatttcatttttaaaaagttattgagtcttttatttctggcatagtatataatccatgtttgaaaatattccttgctaatgggaataatgtatattctgcagtcattaggttaaatgttctgttaatgtctgttaggttcatttggtctagagtccaatttaagtctagtgtttctttgttgattttctgtcttaatgttttgcctagtattatcatttgggcattgaaatccatcacaattgtattgttacctgtgttcttccttaggtctaatagtatttgttttatgaacatgggttttctggtgcagagtgcatatatatttagaattgtcatttttaatcaatcattttatcattatataatgactttctttgtctttacttactggtgtttatttaaagtttttttatatgatatagatagtcttgcttgcttttggtttccaattgcatgaaatatattttttcaccctcttgatcttgaatctacgtatttttaccaattaagtgagtttcctgtcagcagcataaatttcaaaactcttttttattctttccactaatctatatattttaggtgaagaatttaactcatttatattcaaacttaatacagatatgtgaggtctggcttctgttgtcatgttaattattaactagtggctttgtagtcttaattgtgtaatagttttatgagtgaattttataattttgtgttgtttatgatggtgagtactgacctattgcttccatgtctaggtctcccttgagcatttcttgtaggtgcggtctggtgtaaataaatgtccttggcattttcttaccttagaaatactttatttctccttcatttatgaagcttagtttagaaggatacaaaattaatttctgacatagaattttttctttttttttctttaagtagtctgaaattgggagtccaatctcttctatcttataactttatgctgagaagtacactgtcagcatgatagaatttcagataaattattagacacttttctattgtgaattttaggatttttttcttcctatttactttagatagtctgaggactatagatcttggtaatgtctgtcttccagtgtcttctcatgtagttttctgaaccacttttatctgcatatgcaaatatctagcaagactagtgatgttttcctcaattacttcatcaaattggtcctctaaaactttttactaattttctccctcaggaatatccatgattattggctaagttgttttacataatcctatacttcccaatgattttgttcatttttttgttattttcatctgactgggttaatgcgaaatatctgtctcttaggtttgatgttctttcttctttttagtgtagcccattgtgaaagttttaaactattttttgtaattaaaattcaatgaagtctttactccctgaagctttatttttaaaatattaaagtcttaagtaaatcttgaattgttctgatttttttttttttttttttgacacggagtctcatactgtcacccaggctggagtgcagtggcgcgatcttggctcactgcaacctctgcctcccgggttcatgcaattctccttccttagcgtcccgagtagctgggactacaggcacacaccatcacacccagctaattttttgtatattgagtagagacagggtttcactatgttggccagactggtctccaactcctgacctcgtgatctccgctccttggcctcccgaagtgctgggattacaggcataagccaccacgcccggcctgagttattctgatttatttgtgttggttctcaaatttcttttggatttaattgagattccttgaggtcaacattttgaattatttatctgacatttcaaatatatcatgttgtgtaaattctatttctggagagttaaggtgatatccggcgtcttgtaattgtgttttttcatacttccacaattgcttacctgcttgcttttcattggctaaactatctcttactgtttttgaattcattttgattttcatgaaaatttcattccctttagaatgtgaatataacgtatattatgtgggtcttttgatttggttcttggtttactcattggcaaaggctctgtaagagtttcttgtatatagatagtcattatttagtggctttctgaaactatggttgtagtaataatctactgggcctgtgagcaggctcactgcctcctgcaggccctaaatagtggaggcctcagaaaccatttcttatttgcaatgcacttgtttcagcacattttatattgggatgttaagttcacctacacattagtatgtgtccttacagatttgagctgactgtggtagaagcagatgagtacatgcttgatatctgtacacagggagaagctctctgttgcctcaggcgatggactggtctatgaagtgcacagtgacttgagttctctgatcagcccctgagtgggggatgaagctggacagagatgagccaccgagcctggcaagcaaaagcgccagccttgatggaaatggcgagctgaggggcatctactcagtgtggtttcttttgttattaagagctttagtgtggtggctttttcaaattcccgttgtagtagtaacatactgagcatgtgagcaggcccgcggtcttttgcggggttggaatcacagaagtattgagaagctaatctcattttcaactgctgtacactggtggtattgagtttgtatgaggtcatgcagtttgaacgtcaggccagtaggtggtgctcgcaggtaagagccggctatggtggcagcagaagggtttatgctttaccggtggttaaagtgggaaatttgtcatgttccagatcttagagaaaagacttttagctatttctcattcattataatgctgcctgaaagtctctcgaacataactttttattatgtcgagatgtgttctttctatacccattttttacattttttttcctgaaaggatgttgagtttcatcaaatgatttttcagcatcaattgaaaaaaactatatgtcgattaaagatctaaatgtaaaatctaaaactataaaaactctggataataacctaggaaatacaatttaggacattagaactggcaaagacattatgaagaaaatgcaattttaacaaaatcaaaaaatggcaaatgagccctaagtaaactaaagagcttctgcatagcaaaagatactatcaacagagcaaacaggcaacctaaagaatggaaaataaaatatttgcaatctatacatctgacagggtctaatatttatagcatacatgcaattaaacaaacatacaagaaaaaaagtgcccaaaggacatgaaaagacacttataaaaagacctacatgtggccaacaagcataggaaaaaatgctgactatcactatcattagagaaatacatattaaaaccacaatgaggtaccatctcacatcagtcagaatggctaatcttaaaaaaataataacagatgctgctaaggttgcaggaaaaagggaacatttatacacttctagtgcaagtataaattagttcaaccattgtggaaagcagtgccatgatccctccaataacctaaaacagaagtttcatttgacccaacaatcctacaactggacatatacctaaaggagtataaacgtataggttcattccagcactattcacaatagcatagacatggaatttacctaaatgcctgtcactggcataatggatagagaaaaatgtgatacatataaccatggaatactatgcagctaagaaaagaatgaaatcatgttctttgtaggaatatgatggaactggtagtcattactcttagaaaactaattcaggaacagaaaaccagatactatatgttctcacttattttttggagataaataatgagaaatattctctcagggcctgagtcttccatattcaaaaaaaaattctaaaataagtgttcaacaagttgccgacatgcctttaaatatcctgtttcatctggaccccttatatcactcaataaagccatgagaactatatttaaaagtgggattctatgataataaataacttaacagtaagaataggaaggatatggatggttttactaatttaatgggtacataactgtggtatacactatattcctatgaataagatattctgatttcagagctaagtattgtttcctacgttgtgtgtgtgacttggttgtgttggatttgagagtgtagcacgtgcacagaccatgtggatcagaaatccacatgtaaagatgacaatctatggatgtgaactacaagtatgtaagtacttcaagtaattctatttaatggagtttgaaataaaactcaaacttattcaaaacactaattacttggtatttattttgagatctatgagtttatcaagaaattcaaattcctatttctatttaaactcccgattcctactctcagtgggagggaaaactcacagccaatcacacatcacaggacaaatctgtaaacgaagagtcattcctctgaaggtcctgggtgttcaggactctcaggcaggtgctgaggaccctgtcttgggagtgcccagcagatctcagaaccctacatggggcctgctggacactcatgtgggataactagtcgccacttattcagagttaccagtgagctttgactgttccgaatgggaccagcatggagtcaaggtgcctgctcaatgtcagagacagcgatggtctcagaaacaatccaggtaatctctaggccaataaaatgtggattcacagtgagaagtacatcctggaggtggagcttgttcttcagtgggaagagtgctgtgcacagaaagcttagaaatggggaagggggtgcgtttcctcaggcaggattagggcttcgtccctcagcgtcccactcttgtatggctgatgtggcatctgtgttttctttctcatactagataaggctttgagctgtgaaataccctgcctcatgaatatgcaaataacctgagctcttctgaggtaaatataggtatattggtgccctgagagcatcactcaacaaccacatctgtcctctagagaaaaccctgtgagcacagctcctcaccatggactggacctggaggatcctcttcttggtggcagcagctacaagtaaggggcttcctagtctcaaagctgaggaacggatcctggttcagtcaaagaggattttattctctcctgtgttctctccacaggtgcccactcccaggtgcagctggtgcagtctggggctgaggtgaagaagcctggggcctcagtgaaggtctcctgcaaggcttctggatacaccttcaccagttatgatatcaactgggtgcgacaggccactggacaagggcttgagtggatgggatggatgaaccctaacagtggtaacacaggctatgcacagaagttccagggcagagtcaccatgaccaggaacacctccataagcacagcctacatggagctgagcagcctgagatctgaggacacggccgtgtattactgtgcgagaggcacagtgtgaaaaaccacatcctcagagagtcagaaaccctaggggagaaggcagctgtgctgggctgaggagatgacaggggttatcaggtttaaggcttttttgaaaatgggttatatatttgagaaaaaaataacaatagaaacaagtacacactctaattttaagagatatattcaattcaagaattgtagaagccgaattcacagtgggaaaggccacactcaataaagttgataaaaacattccaggaaggtgctactgtgaacaagttttcaaattagatgaataaataatttggagcaatgttatttgatcatgaggtgagacagtatgattcttaaaaagtggaaaaaattctttcaaatgtttctgccactctttatcataaaattaattttagagcagttttaggattacaatgaaattgcacagaaggcatgagaattcccatgactccctgccctacacaggcagagcctcctccactatgaccatccagcaccacagtcacaaatcagttacaatggaggaatctccaaggacatttgattctttcttttttggtgatgccctaatataacaagcctaatttatctcggaataccacaagttttgttcagtggatttctaggaatcatattagttagagggaaagttggtgaggctcttactatttgaactcattcttccaaaatccacaaaacatatattaatttaaagcttatcttacttctggtttacaggatccttcccagagagtaagatttttaagattttagaggcaggttcatgtctctaaaaggccagcaagttctggggaatcccataatgaacatcctttcatgggaattggagaccctggcaatgagagactccatgtataatgccctagagttggattagatgcactgtgagctcttgggtggtggttctgaaaaaggtggtctgtgcagtaaatgcaaacacatgcacgggacacaggaaggagcaaaagcttccctttacaaagtgtgtgggcacctggaagaaaccctcacaagggcacgtctcacccttaatgactgcacattagccaggggcatgatcatgattggtcttacaaggaaagagcaccactgaggtcataggttatgaaaatgtcatcctccagctgagaaattccatctgctggcatgtgcgtgtcaaccccgtggagggtgcactctgggagttgacgagatgcatagaaacctcctgtcatgaattatcgtctaccacacagtcagaatcaacctgtgctccagaaagagatacatgcctgtagaaataaacagagcttaaggattttcttacctgctgaatatagtgcccaaaaccacactttcaggaagattagctcagaaatgtttacaaagtgactgaagggcagtggcgggtgaggtgatgggacagcctcagggctgcacttgaggagggctccctctcccatgcaggcttttcctccaggagctgcatcaggaactcacagaggataagggagaattctgagaacatgctactgtggtactgcctagagaggaaggataaatgatgacaaatacatctctgagtaacatatgggcatttgttcatgaaaactgttttttctgaaagcttatgaaggtcttgaaatgcccctgattagctgaggacaaacatttaaaccctccttccacagggagttcaagcaggctggatgtgtcctgctatggatgatcttccccagccccttcctcttcccagctcatccctggctctctgtgtaaaaagttttcatcagtggaaggtggttgatgaagtgaggtcttcaatttcctcatcttctctgtggtcatgttattttcctcatctgaggtttaaaaactcacctgcatgcagcacatgacaggctaaaatctcttgtggacaaaacagtaacaaaggcacccaccatggttgagcacccgtgttgctgacagtgaccaccaagggtcaacgtcctcttcacaatcctgtgtcagagcagcacttgagtgatttcactagcaacttcccaggagaatcggcttaaaactacttgtcgcattttccatacagatataacacatctattttcctgaagaaatagaaagagctgaatgctgaatacactgtatgtctgctggttctgcaagtttgtgactatcactttctaatttctgatctgtgtggaccaccctccagatttttctcactggtgtgaccagccttctggatgtcaaatataattaactttttttcatataaaagtcaacacaagctcctcatggtttcggtgctcactgactactttaaacttacacaatatgtttctttattagttttgttttctggtatctctactcagcatcttcaacacacccatgttaagatgcttgtacaggtaattgttaattttaaatttactggtgtttagtttaattaaataggcaggcaatagcttagaatttagaaacaacaatgtaaaggaaaagtaaatgcaataaaatttaacataagaaaaccagcagctgaaaggaagggaaatctattctgccacctaagagggtatggtgacctcatagtacaacgaacttctgcagtttaatcgatactgctcacaagtgatagcattctctctctttatatcagagcattccctaacatgtacaataaagagtgagcagatacctccaaccagactgaccagtacctctccctgagtgcctcagctgatagagatagacatcacatttgtctaacaaaataattacaggctgtaaggatacccaccagtcatatggagataatttgaaaaacttagtcaaagcccaaaccttataggtagtcatttatacttagaagaattaactcttatcttcacatgtatttttcttaatcatagagaagctactagagtcactgtccaagttactgaatatcttattcctagaatgagacattgcacaatgtgttctgacatgagggaatgtagctatagttaaaggataggagatgtgatcacggaaacacgagtctgcgatccagcagttctttctccctcacatttgcccagaaacaaagaccccagcagaaaaatggaagggttgacttcagtctccaaagtatgatgtgagatatacgtcaggtatttcatgccattgttttatagtaggaaatttaatctctaaagaaggtcattttcaggataatactattctccaggatacttaaatgcccgaaaacagagagcgctacagtgcccagtgtccaggagctacctggcacgggtctggaaaccagtggacagaaatatcagtttctcttaccacatgtatgttggaaatttgaagaatgtttctttccttcttcgtaatcataggctgcaatggactggaggtcccagtacataagaggaaatgtgtctccagtaggaacacaattagtcccataaaataattgtgctcacactgtggtgcccacactgttggaccagctgactgagaaagtgttgtaagagctgcagtgtctactgattcctatcatatttggggctacattcgcagctaccaacggaaagagagagaagtaaaactggcttaggtagagtctatggatttgctttctttccttcaaactgaagtaaaaaaaaaaatcacatcaactaaaatggggacgatgatgaagtgatcaaggacaagagccactcagtgttttaggtgggttttaacctaaagtcccacaacatgtgagaacctgaactctggagtccggggcatctctggggagaatgtggaaggtgggcgggaggaaacagtgattcatgtctagggaaatttcagggctacctgctctgggggaaaggaaagcctgagcctctccgacagtgtcctctgttaaaattgttggctgacttattgtattcttcaacaccaatatttttttagtcctcttttaattttgtttttattattatactttaagttctagggtacatgtgcacaatgtgcaggttagttacatatgtatacatgtgccatgttggtgtgccgcacccattaactcgtcatttaacattaggtatatctcctaatgctatccctcccccctccccccacaccacaacagaccccagtgtgtgatgttccccttcctgtgtccatgtgttctcattgttcaattcccacctatgagtgagaacatgtggtgtttggttttttgtccttgcgatagtttgctgagaatgatggtttccagcttcatccatgtccctacaaaggacatgaactcatcattttttatggctgcataggattccatggtgcatatgtgccacattttcttaatccagtctatcattgttggacgtttggcttggttccaagtctttgctattgtgaatagtgacacaataaacatacatgtgcatgtgcctttatagcagcatgatttataatcctttgggtatatacccagtaatgggatggctgggtcaaatggtatttctagttctagatccctgaggaatcgccacactgtcttccacaatggttgaactaatttacagtcccaccaacagtgtaaaagtgttcctatttctccacatcctctccagcacctgttgtttcctgactttttaatgatcgccactgtaactggtgtgaggtggtatctcattgtggttttgatttgcatttctctgatggccagtgatgatgagcattttttcatgtgtctgttggctgcataaatgtcttcttttgagacgtgtctgttcatatccttcacccactttttgatggggttgtttgttttgttcttgtaaatttgtttgagttcattgtagattctggatattagccctttgtcagatgagtagattgcaaaaattttctcccattctgttggttgcctggtcactctgacgatagtttcttttgctgtgcaaaagctctttcgtttaattagatcccatttgtcaattctggcttttgttgccattgcttttgctgttttagacatgaagtccttgctcatgcctatgtcctgaatggtattgcctaggttttcttctagggtttttatggttttaggtctaacatttaagtctttaatccatcttgaattaattttcgtataaggtgtaaggaagagatccagtttcagctttcctcatatggctagccagtttttccagcaccatttattaaatagggaatcgtttccccatttcttgtttttgtcaggtttgtcaaagatcacatgcttgtagatatgcggcattatttctgagggctctgttctgttccattggtctatatctctgttttggtaccagtaccatgctgttttggttactgtaacctcgtagtatagtttgaagtcaggtagcgtgatgcctccagctttgttcttttggcttaggattgacttgacattgcaggctcttttttggttccatatgaactttaaagtagtttttcccaattctgtgaagaaagtcattggtagcttgatggggatgtcattgaatctataaattaccttgggcagtatggccattttcacaatgttgattcttcctacccatgagcatggaatgttcttccatttgtttgtatcatcttttatttcattgagcagtggtttgtagttctccttgaagaggtccttcacatcccttgtaagttggattcctaggtattttattctctttgaagcaattgtgaatgggagttcactcatgatttggctctctgtctgttattggtgtataagaatgcttgtgattttttcacattgattttgtatcccgagactttgctgaagttgcttatcagcttaaggagattttgggctgagacgatggggttttctagatacacaatcatgtcatctgcaaacagggacaatttgacttcctcttttcctagttgaataccctttatttccttctcctgcctgattgccctggccagaacttccaacactatgttgaataggagtggtgagagagggcatccctgtcttgtttcaattttcaaagggaattcttccagtttttgcccattcaatatgttattggctgtgggtttgtcatagatagctcttattattttgagatatgtcccatcaatacctaatttattgaagagtttttagtatgaagggttgctgaattttgtcaaaggccttttctgcatctatcgagataatcatatggtttttgtcgttggttctgtttatatgctggattatgtttattgatttgcatatgttgaaccagccttgcatcctagggatgaagcccacttgattatggtggataagctttttgatgtgctgctggatttggtttgccagtattctattgaggatttttgcatcgatgttcatcagggatattggtttaaaattctctttttttgttgtgtctctgccaggctttggtatcaggatgatgctggcctcataaaatgagttggggaggattccctctttttctattgattggaatagtttcagaaggaatgctaccagctcctccttgcacctctggtagaatttggctgtgaatccgtctggtcctggacttttttaggcaggaatttccttgtcctaataagcccaggagtgctacaggagaccagggcttatttcatccctcagcggcgaccgtaaaagacagccatcccgaaagcagccatttcagaggcctcccctcagggatgcattctctttctcagggatgttccttgctgagaaaaagaattcagtgatatttctcccatttgcttttgaaagaacagaaatatggctctgttccacctggctcaccagcagtcagagtttagggttatctcccttgttgcctgaacattgctgttattctgttcttttttcaaagtgcccagatttcatattgttcaaacctacatgctctacaaacaatttgtgcagttaacgcaatcatcacagggtcctgaggctacatacgtcctcctcagtttacaaagattatgggattaagagactaaagtaaagacaggcataggaaatcacaagggcattgattggggaagtgataagtgtccatgaaatcttcacaatttatgttcagagattgcagtaaagacaggcataagaaattataaaaggattaatttggggaactaataaatgtccatgaaatcttcacaatttatgttcttctgccatggcttcagccagtccctccgtttggggtccctgacttcccacaacagtttattaactttgtatgactaataatgtaaaatgttccccatatttttagcaatgttttacttatttgtgaaaggtgtgtttattaatttttcattttaaggtgtcacatttatctttcttgtttctgggatttcattctagtagatatagctgaatgcattttaacaattattgtaatcatctcacattttatatttggatttgcatatacattttattaagattttgattttgatataaaatattttcttacaattgtctcttttctatttttatgagataaaattaatgtatgcataattgcatacatcttcaatgtacagtttcagggtttctgacatatgtgcacacatttgtctccagcacctaagttaggatgaggagcaggtcagtctccacaacaagtgtcctcttcagtgcttccagtcagctctcacataaggatttttatttaatttcaagttttcattttcactaatcatcagagaaatgcaaatagaaaaacgttctggtttctgtcactacagttcaattttttcctgttttgggcatcacataaatggaatcaaatgttatagttcattttttgtaaggggctacttttgctatttgtgaggttcattcatgtatttgcatctaccaaggttttgtcatcatatatatacacacacacacttatatatgtactaatgcacatataggtatttcatatctcaatcagtccattacgttaataaatgacagtttattaagtaaatccattcattaagtgaataagtgacaaaaaatatatctattttcctgttgatggaatttagtttccaaaataaatatcgtaaacacatctgttataaatatctttgtacaagttcttctgcttatatctcccatttttattgataaaatatgtataaatataagtatgcattataacttttcagctttatggagctataactgacaaataaaattgtatgaatttaaggtacaccacttgaggtattgatatacatggggaaatattcatcgtgatcaaagtaattggcatgcctatcatctcagagaatatcattttatgcctttaatttattgtgagtctgtgatgaaaacacctaagatctactcttctggaaacagataagtttataatataatattcattagtatagttacattgctgtatgtttcatctccagaactccttcaacctgtgtatcagtccattctcaaactactttagagaactacctgagactgggaaatacatgaagagaagggagttagttcactcacagttctgcaggcttagcaggaacttatagggaggcatcaggaaaattacgatgattgtggaaagtgaaggggaagcaaggaccgtcttcacatgctggcaggggagagagagaaagagcaaggggagatgcgccacacttttaaacctcaagatcttgtgagaactctaacacaagaagagcaaaggggaaagccgcctccatgattcagtcactccccatcagacccctcctacaacacttgaggatgaaaatttgacatgagatttgggtggaaacgctgagccaaacagtatcattatacccggccactcacaaatctcatatccctctcacattgcaaaatataattatcccttctcaacagtctcccagtcttcactcaattcagcattaacacaaacttctacagtccaaagtctcctctgagacaaggtaagtttcttggatgtataaccctgtaaaataaaaaacaagttagttacttccaagctaatatgagatgaatgcactgggtaaatgttcccattctaaatgggagaaattggccactacaaatgggctacaggccccatggctagtccaaacactagcagggcagtcatcaaatcttaaagctccaaaaaaatttccttttactccatgtctcacatccaggacacgttgatataagaggtgatctcccaaggcctttggaagctccacccttgtggctctgcatgttagactccccatagctgctttcataggctggcattgagttgctatgtcttttccaggcacaccatacaagctgctggtggttctaccattctggggtctgaaggacagtggtcctcttctcacagatccactagacagtgcccaagtggggactctgtgtgtggaatccaacaccatattttccttctacactggcctagtagaggtactccattagagctcagcccctgcatgagacttctgcctggatatccaggcattatcatacatcatctgaaatctaggaggaggttcccaaacctcaactcttgcctcatgtgcaccagcaggctcaacaccacgtggaagcaaccaaagcttagggcttgcaccctctggagcaatggcctgagctggaccttgaccccttttagccatggctggcacaggacagacagggatgcaaggcgccatgtcccgaggctgcacagagcagtggcgtcctgggcttggacaaagaaaccatttttctctcctgggcttctggacctgtgatgggaggggctgccacaaagatctctgaaatgccctgcggacattttttcccaccggggtccttgttacttatgcaaatttctgcagccagtttgaatttctccccataaaatgaggttttttgtctaccacatggtcaggctacaatgttttatcaaacttttatgctccgcttcccttttaaacgtaagttccaatttcagaccatctctttatgaatgcacatggcttatgttttcagaaacagccaggtcaactcttcaatgctttggtgcttagaaatttcttctgccagatataccttaaattatgtctctgtagctcaacatttcacagatctctagggtagggggaaaatgccactagtctttttgctaaagcatagcaagtgtgaccttcactccagttcgcaataagttcttcaccttcatctgacaccacctcagactggacttcattgcccatatcactatcagcattttggtaaaacccattcaacgagcctctaggcagtttcaaacttttccacatcttcctgtcttcttgtgagcactccaagcttttccaacctctgcccattacccagttacaaagtcacttccacattttcaggtatcttaatagcagtatcccactcctggtgcaagttttctgtattagtccattttcacattgctataaagactacctcagactgggtaatttatgaagagaagagttttagttaactctcagctctgcccgctaaacgggaagcattattgggaggcatcaggacgaacaatgatggtggaaggtgaacgggaagcaagaaccttcttcacatggtggcaggagagagagagcaagtgagcggggaggtgccacacttttaaaccatcagatctcttgagaactttatcacgagaacagcgaagaggaagacaatcccatgaccaaatcactttatcttaggcccttccttcaacatgcagggtctacaatctggcatgagatttgagtcggaacacggagccaaaccatatcaaccttcataacgggaagtttttaccctttgaccaacaatacccaattttttcctcctcccagcccctgcgacctactattctactctgcttccaagagcttgaatattttatactttagattctatatataaatgagatcatgcagcttttgtctttctgtgtctggcttattccacttagcataatgttttctatttgttgcaaatataagaatttctttgtttttaaaggctgaataatactcagttttatgtaggtataagccacattttatctgttcattcgtagatggacattgactcgttttccttatctagactattatgaataatctcacaatggacatagatttgtcacactcagtttattttctctagatgtatgctcagaagtggggatgctctatgtccagttcactgagtaatcttcatgttgtttttcatactggctgtaataattcacattttgttccaaaccatacatggatacctttgtaccacatattcaggtctttgtgtaactcttgaatccatttttagctgatttctgtgtattgtgtgaggtgagttctatctatttcttctgcatatggatgcccgtttttcacaccactcgttgaagagactgtcctttctctactgtgtgtcttgggaacttgacaaagatcagtttattaggaagaaatgggttggtttccaggttgtgtttaatgttccattggattatatgtctgtttaaatgccagcattataccattttgatttatatagatttgattttgaaattatagattatgatatattcagctttgttatttatgcccaaaattactttggctatttgaagtcttttatatttttatataaattggagctttttaaaaacattttgtaaaatcatgccatggagattatttatttattttattggcatatagtagatatacctattttatgggaacatgtaatatattgatacatttataaatgtgtaaagattagtgtaagatttacatatctgtcacattaaaaatgtaccctttccttgtgctgagcacatttgaatgactcctttcgctattttaatgttgtgcattagattattattaactatagtgaccttactgatctatcaaacatttaggtcttatttctcctctataaatgtatatttgtatacagtaatcaacctctccttatctccttctctcttctatccatccaggattctggtaagcaacagtctattctatcttcaggcgatccagtattttagttttgatgtaaaataagaagatgcaatatttgtctctcttttattggcttatttatcttaacataatgacttccagttccattcatattatagcaaatgacagaatattgggtttcatggctgaataatatcctatcgcatacatagattacatttactctatccatttgtccacctacagacactgaggtgctttcacatctgggctattgtgaaagagctgcaaagaacatgggaggggacatgccttcatgaggtggtggtggttttatcttctttagaacatacccagaagaggatttgccaagtcataaggtatttctgtttttaatttattttggaatcttcatactactttgcacatagtggaaacacaaatggagtaaacattaaaaaagcagtttcggttttgatgtataatccagaaacaaataatgtttgaccatgattctcattaggagtctctaatggatctggtggaaatgcaggaagttttctaaccttgttcaggaaattatgagtttgcacctttttctttttgaggcttgaaattggcatgattcatgatgcatactgttgggaggtttcagaatgatatggcaaaaatcataatgaaaaggcaagacagagagagagggagagagagagagtcaggcctagaaagagaaaaaataattttctcaacaggagaaagtgctggatatctgtatcagtgttgagttttgctcatagacacatctgtaccgagtgaggaaccatgaagtcaagggaggggtctagaacttgttcaagtgaagcatcagcatatttctcacaggcaccaatttccaccacatcacaagggtgatgcatttttgaatgccattaaatatgagttcacagtcagtaatcatgtttccatgaaattcagttaaaataccaagggtgtgtccagatcactcatgcacaaatacacaaaatttgctttttcatgtgtggctatctagagacaaagtgcactgaggagacttcagcaggttacagagatttgcttaagtttggaaaaccatagaagagtgcctttaagtgaaggttggtatataaattaaataggtcaaaatcccctctatggagtagcgttccaattgtgtggaatttttaattccttattcagttgtaaaacataatccctaggactgactccgtggagttttactgctgtgttgacaaaaatatctaacaagcttccttccagtgtttcaagggaagtttttctctaaattttttccaatgtataaattttcctggctaaagatagtaaaaggctgttaaaaacacaactggaatggcagctttaatcttttgctgattgataggagtgagcataatacatgaatctctttgagtgttctgcctcatccaaatacaataggtcaaaggctagtactggaggtaagatttccaaatgtgtttttttccagctaccaagtcataggaaaataacagatacatccttgagacagaggaccataatgccacaatgctggtaggagtacatgtagacaagggagttcaagggtttcttaaaactgataattttaatgtaagaataccattcttttaaacttatgtggaagactgtgggaggttataacaatgccatattttagtatcagccctgcctcacagaatcattttataacagttcctttcatgagtgtgcttcactcggttcatgcaaaaacctggcagatcacaggctaaaaacagaaaatatagaagcttttaatcaactgaaagagctgtagcctttgtcaaggaattattggaagacacagagaacacagatagatgataaataaaatacattcatatcccgttaagtgtggaaattgaggaaagtttacataaatgtgtccaagtggcaaactgtttatttaatctggtaaccaatttttctataaattgtagagttgaaatgcaacaaatacatatttgaaatgatctggcacaaattaagcaaatatggtaactatgtattttcactcatttttatttaagatcagcggctcagcattgatatttttgataatatctgtgactcagcagctttaccttttgaggatatgatctggtatggcagttttcttagcttcaatgttacctctttttgcattgacttccacctttatatctgccaggaatctggggaaaaggagtgcctgtaaacgttccctaacttgcccattttggtgggttttccagaatgtgtgagatgctttttttttttttttcaaagcatcctgaacccatgcactgccctgaaacatgtttatttcctagtttaacaaattggcacttctaataaatgcaatctcttctgccatctgtgctgattttacatcagatagaggactgtgttctaaaggaaatcttatattagtaagagcaattttgtcattaacctagagttttattattgaggtgtgattcataacatataatattaggtagaggttctcagtggcagtgtctaaatctcttgggtgtacagtgtcttccccgttaacatgaagcatttacgagcacagtcatagtttccagccatgcttctccctgtctcacaatcaccacaaactaactatgaccacaactggaacttggtgagttattctttaataagttttaagtttgtctttaatctttatgcctctagattattatgtgagacataatctttatgcctctagattattgtgtaaagctatttcagaagaaagttaaaaagaacattttaactgactaaacaacacaggaaatcattaataaaatgcaaagtgtagatgtgagaggctccaggcctggataatgcaagagttcatgtatgcaggcagtttctttgcccaattatactgatacaaccagcatgtcagcttcatgccccatttgactcctattatgcaagcgcatggaaatgacatgctcaagggtcacacacagatatgaaaactggtgggagcaggagaggagacgactctgcacttctcctctgaaggaccaggaaagcctggacagaccatctccccagcctccatgactgcgcgacgtgcccacatggacactcatctctgacaagataagaagactccattgatgaggctgaacattttatgatttaaattactagagacttacattgaggtttcaataactaatttttataacccaaatttacttacccccatgttgttacctctttcttcagtgaaaaattgcttttgctgtaattgagttttaggaagattcccagtgttcacaactgagcttccaagagagtgttgagaacaaaaactgaatgagggcagagaaacccatctttactgtgttcaccactaaactcaagtggactcggcactgcctttgatcactgttgcttctctgcagagttcaggtttgtatttctcacaattctaacacagactctccctctcctcaaaggtttggcctccactggctgtaaggtcacactgttctgaatttcttgtctgaaccgttttatgagggtggtgatgagccatttaatggaaattttatatcatctcagcatgaatcctatgggcggtcacgaattattattctgattatggtaattgatttttctcagcatattcattactagtgatattcaaaaaccctttttatttaaatctttgatgcttcatttttgttgctatgacactttttcttctactgagtcttcccactagcattataacatgacctaatatccagggctcagttgttatataacaaccacatatgtcaaaagctatgcattcttttcacagcagacataattttctcttttctggagatgaacacacactggctgagctacccccactcacaagaacatatggaaaatcatgacatttttatttacttgactaataaattatgtcattctctcttcaaattctttatcccccagaatgccatgacaaactcttctgcatctgttcaaaccataaactcagaaaccacatggtgagtaaaagctcacttgattcgggatattgggtcaagctcttcccctccaatgtcccacagcattgggacctcagcccacctgtccaggttctatcaagagagtttagctccttcacagtgaaggaaacaattgagttaagagggaacctgcagaagatagacaatattgaaaaccattcatatgacaagggattactatcaagcatataaaataaactcaacccaactgcaaataataatgtggctaataatggaggaataacattaatacatatttctcaaaagaagaaaagaaaaagggcagatagatgatagatagataaatagatatattagtatgtatacatacatatatcgctagaaaacactaatattcaggaaaatgcacattcacaatgagatgtcttttcatcctttatctttgcttgagagtcagaaaatctaaataaataaataaataaaacaggagctggccaggattcatagaaagggaaactcttatagaccattggtggaaatggaaattagtgaagccatcatgggaaaaaatagaactaccatataattcacaatccaactgctgagtatgtatctatttaaatcattaaagtaaaaaactaatattgaagagatacatgtacacccatgtttattgcagcactatccaccatagctaacatatgaaatcaacatatgtgtccatcaacagatgaatggataaataaaatgtgttatatttacacaatggaatattgttcagtcttaaaaatgaaattctgctgttagaagcaacatggatggaactggacaccatcatgttgagtgaaacaagacagacacagaaaaataaatacagcattttctcagtgttatgtggaaattttaaaaagttgatcttctagaagtaaataatagagtagtggttatgagatgccgggaatgggaggagactgagagacaataagaggtttgttaacaaacgtataatttacaggcagataggagggatgtgctccagtgatctacagtgcagtagggtgactgctgttaacaatatagtgcacattttatgtttacaagtagccagaagacagaaatttgtatgttaccaacaaaaagaaatgttagtgtctaagctgatgaatttgttcattgttctgatttaatcataccacatggcacacatgcatagaaatatcacactgtaccccatacagttattatgtgctaactttaaaaaatcctttaattaaaacagattttatttgcatacattacaaatgcttcaacacagagccaggaataaataccatttttctttgaaatgtgaatttcctaacaacgtagttacattcatttgaaccaaaccgtgtatttgatcatggtaagaatagacaggcttatgcatagaatgatatattttaattttagacttctacttaataccataaattcaaataattttaaaacaactaagtaaaaactataaagttgaggaaatgtgtacgtggtgtgtgatgtgtgactttttccttgcgcaccactctgtccatggtggatgtgtggtgtgggtgtctgtgtctatttctgtttactctgcttgaggttctctgtgattctaggatctgtagttcagtgtctttcacaaaactgggaacgttcttagccattatttctttcaaatactgtctctgtatctacaatttctcctttcagatttaaaatgtacatatacaatactttttaatattaatgtttactttcttcactctcttttccttgcactttactctgtaaaatttctagtggtattttaagtgagtggtttcatttaaaaggtgagccagctctactgaagggtgtgcccaaagcttactcaatgtttatactgcattgcttttgatttcttatgcatttccatttgattttttcttagtattttcaactctcagttccctatctagtccttcattatgtatacagtttccttaatagatttttacatatgaattatagttactttatatatcttgtttaattagatagttctaagatccatatcatatagaagtctcattctgatcatttgtttattatgactttggtatttctcattaatatatgtaatctttgttgatagccagatattttaggttggacagttgatattggcttattacttcattttatgcattttctgcctgtatttgaccatactttatttttgccaggcctttaatgtggaaatgtttgaatcttctcagagctacatttgacgtttacttttgcagtagacgtcatagttgaagtctgttcttctgtgtccaccagagacttcagatcctccagtgataccttgtttttctttcctgcttggctttgtctcttcaccctgttccttcctccagagaatctctttcagctccttcaggtggattaagatattatattgaactgacaattgtgaaattggtggaaggcaatagaataaagggagattttctgacctttcatgggtctatatttctacgaaggcattgtgaccctgagtctgggtgtgacattgccggtgtttctgaacttctgccagatgagatgttggtctgtgtgttcttgctgttttccctgctgtggagtcctcttgttttccccagttgttccctcccacagctccaatgttctcttttggtgttatcagcttccagagttgatgacctgacctagagattaaggctctgattaaataagaaggaggggagatacttctcaatggaacttaggtgaagacctctttttccatctcagttcctaagggatggccccagtgcccctaagatcctggctttggtggcttgctcctgcagagtaatttcttagttctgcaatggggattaaggaggtgggtctgaatgcatttcagagtgtgggctctttttctctcccagacagacacattgggacaaaagatttttgtgactgtccccatttttgggaaaaaggtttcaaggtataggaaagctcttcagtatgtggtccctgagaaattcacgctacaacacatttaccacacttgacttcaccaattcagtatgtatgtatttttttctcttataatagcctacatttttatatgccagactctgcctcagttcaactcatacccatgcctttttactctctgcaagaacttgtctctccctaaatttcggatttgatgattatcttaaaacctccagtatttaaagtatattttaaaattggcaaaattccatctcctgtgtttatctgttatgttgatgctgtaaaacagtaagtaaaatatactcctcatctatgtacattttgaagctgagttgcaggttttttggtaagacccagagtcacagagaattcaaatattgttaagctgcttaatagaaaaacaaattatggtaaatgtgttcactggaatactacccatgatttataataaataaatgcctgacacacagaacagcagcaaaaccacacatgctcttattacagaaagtggcttctgaaaaccacaccgggcacgtacagctttgtcctggagttggtttagggggatgtcagagccagtgacgagaagcacagggccagatggcagcgttcactcatcccagacatgagctcctggatgcatacagagcccccccatgtgtgggtttacttccacttctgtaaaaggagaaaatactgactcctacagagcataatttacacattttttaaaaaatgtaatagggtgatcagggcaaagtgtttatcacagcacaatttcataagacagcatattttccaaataccatcattgtcagcaaacttctgcagagcaccgtcttcttatatgggtacagcctattcctccagcatcccactagagcttcttatatagtaggagacatgcaaatagggccctccctctactgatgaaaaccaacccaaccctgaccctgcaggtctcagagaggagccttagccctggactccaaggcctttccacttggtgatcagcactgagcacagaggactcaccatggaattggggctgagctgggttttccttgttgctattttagaaggtgattcatggaaaactaggaagattgagtgtgtgtggatatgagtgtgagaaacagtggatttgtgtggcagtttctgaccttggtgtctctttgtttgcaggtgtccagtgtgaggtgcagctggtggagtctgggggaggcttggtccagcctggggggtccctgagactctcctgtgcagcctctggattcacctttagtagctattggatgagctgggtccgccaggctccagggaaggggctggagtgggtggccaacataaagcaagatggaagtgagaaatactatgtggactctgtgaagggccgattcaccatctccagagacaacgccaagaactcactgtatctgcaaatgaacagcctgagagccgaggacacggctgtgtattactgtgcgagagacacagtgaggggaagtcagtgtgagcccagacacaaacctccctgcaggggtcccttgggaccaccagggggcgacagggcattgagcactgggctgtctccagggcaggtgcaggtgctgctgagggctggcttcctgtcgcggtctggggctgcctcgtcgtcaaatttccccaggaacttctccagatttacaattctgtactgacatttcatgtctctaaatgcaatactttttttgtcctttttgtttctttgtttttttgcaacaggagtacatatcctcagctccacagaagccagggtgtcactttgggggcagaaataatcgtttcgtggtcaacaggatgagagtcctgaggaatcccagggaaacctggagagtgttttccaattagactcagggcagagacctccatgggaatttctgattagaacgggctttgagctctgatgggagccaagagacaggctcacccagggtcggggtccttaaagcctgatggttttcacagctatcccccctcgtcttgtaaactcagactgattcagttgaccctttttctgctaatccattttgcttctctgtaggtttgattctcacagttcgctttcttcttctcttccctgagaacaaacgatgtgttttctgttttcagggaaaatcccagggctcaggtctgcaggacctgggtaggctgaggagactttctcactcaccattgtctggacactcctgttgtcttctgtgcatggaggcatttgggaaatgaagtggacattagtcattaagggaataatactagttttctccaattggatattgatgtagagctgaacttgtgcttctcacactgtcacagagtttggaccctcacctataactttgaggagagttgatgatggatagtccattgtgggtgagctctgggtaacagtaattgtagggtctggctaggcagcctaaggtcaatacttctggacctcaggaaagacaggctggaattcctgggaagacctgcatctgccatccaccgtggagtcccatcatcttctgttatgctgtgattgaatcagccccacctagtttatctagaacactcttcatgacttaggaaaacataatggcaagctctcctaacacctgtatcatgccatgggagcaacacctaagctagtgtgtgattgagtagatgagactgtgatctagtcaagacgacaggtaaaattgattgttgtcattatgatattttatatttggcaatataatcatgctcatattataaatacttttgctacattttttgagtgtgtcagaggctttggaactggaacaacttcatcttgaataggggctaggaaaaataagaccgagacctgctgggctggattcctagtaagttgatgcagtaagttagtcacaggatgagataggaggtctgcacaagatccaggtcataaaggccttgcagataaatcttacagtaaagaagctgggcaaagccctccaaaaccgagacagtggctaaaatgacctcagtttgtcctcactgttcattatactctaattataatgcattaacatgctaaaaaacactcccttccagcccccaagacagtttacagttgtcaaggcaacatcatgaagtttccttgtgtggtttaaaaaggaggggaggaacactcaacttcaggaattgcctggaggactcatgaataatccatccattgtttaacatataatcaagaaataaccataaaatggacaaccagcagcccatactgctgctccacctctggtgtagccagtctcattattttacttgcataagaaacttgttttcattttaatctgtggattttccccaaattgggacccctttctcctaatatttgtgctattattcgtgttctgagcagaaaaccccaagatggaatgaagtttccctacatttttataagaagtacattcacccctttgagcgaaaatgcacagggagtggaatgaggctgggaagctaatggcgtatgatggaagcttgtccctgactggaggagagagggagggaggattgggaggaaggttcctatatttttgtgctatgcaaggaagctgcaaaagataactgagtctcgtgtaagtcagtgctacctctcaggggatccctgtgactccaagaaagggctcttcttaggaatcactgtggagtcagtcctttcattagagtagaccacaggacatgggcctcagcacacgccatgccacagatgtcagaaagcagctgctgggaacctgatccacctgcattttgctgcctgtaggaggagggagggaggtgcattctcagggtcagcacactgtttgtgaatttttatagagaacccctgcttttgctgtatttttattggaaaatatatgaacaagtgtgcacctgcaaacaactgtaattttcacatttccttcagttgcattatttcttaatcctgaatgacgtcctgacacagagttgagtttttcacaggcattgttcgaaggatcgagatgatggcattttccacattcactggtttttctccatgtggcagagaccttgagtagagcacatctggcccttatccacactatctcttgtgtcccctgggaaagagcagagatttgcctgactgcagaatctggggtaggagtctgcacacctctgagcctgcagagaagctcagcgaagttttgtggagtcagagagctttccgtgtggggaacctctagcttcctcactctcggagattaatggtcagctgtacttgaggggttaagaattagagcaccttgggagcctgtctcatcacagttccattatgtaacttaccaccattagactgcgggtaataactcaatcttgatttttctgacccgattttttcatcttattcattactaattttgtttatggaaaatgttatgtttagtttatgattaaaacctcagaactttctgaacttatcaggaataatacaaatgtgtccagtttgggggaaatgtaaatgaatgtccatgcagtttgggtgtgtgtgtgtgcgtgtgtgtgtgcatgtgtgtttgtttgtgtgtgtgtggatatgtcagtcacttacaccacaatgaacatgattgctgaattacatagtcaaactaaaattagatttgctgaaaattgcctgcagcgatgtctgtgaagctgaccctgtcactttgctgtgaagaaactcagtgtacaggcgaggttgcacgggagagctaaaagcttctgcacacaggacaggctgagctcctgaactggagccaggcacaggactgagcacctgagaaacagaacccccagccctcctttatctgggctggatgggcaccagaggacccgcaggagatgctcagaactcacacaagacagagcctcagtgaggagcagaggcagcgaggaaccagtccagggagccctgtgaccgccacctcgggttgtcttattttgcttaacagcatccaaacctcaggagaccatttattacgttatttagacttccatgccctttctgtcccgaagtaaaacaaacataaatatgactctgcagttagctctttgaacctgggttatttttctgagaatgtcatcttcgtcatcaacatcatggtcatcatgtcaaaatcaacaggcaaatccagtcaccgtgaagacagtttcatggcatgattcatacacaatcattccattccacagagaatctctttcagattcttaaggtggattaaagtgttatatttaattgccaattgtgaaattggtggaagacattatactaaaggaattgtctctgacctctcatggggtcatatttccagaaaatcattgtgatcctgagtgtgagctgactttccaagtgttcccaaccctcctccagatgagatgctggtctgtgtgttcttgctgcttcccctggggcagattcctcttgttttccccagttgttccctcccacagctctcataatctctgttggtgtccccaacttccagatctgctgccatgacctgcagattaaagctctgattccgtaagaaagtgaggggagctgcttctcaatagagctttgatgggaacctctgttcatacctcaattcttaaggggctgcaccagtgccctaggatgctgattttcatggcttgctcctgcagggtaatatcttagttttgtagtggggatcagagaactgggtctggatgcatttcagaagtgtgagctcattctctcccagacagatactatgggaaaggaagatgttttgcaggggtaaatgattcaagagattagggcaactctccagtatgaggtcccttagaatttctcactataacatgcctaacacactcgacttcaagcaatccagtgtatatttgttcttcatcttgtaatagcctacattttatatgacagcctctgcctcagggaatttcatactctggcttcattactctctacaggaacttgcctctccctagatttcaaatattttgtttgttttcaaccctcaattatctgaagcattaagtaaaatttgcaaacttccatcttttctgtttatctgttattgttgatactattgttgtaagaatgaatatatgggcccggcgcggtggctcatgcctgtaatcccagcactttgtgaggccgaggtgggtggatcacgaggtcaggagatcaagaccatcttggctaacacggtgaaaccccgtctctactaaaaatacaaaaaattagccaggtgtggtggtgcgcaccagtagtcccagctacttgggaggctgaggcaggagaatggcgtgaacccgggaggtggagcttgtagtgagctgagatcgcgccactgcactccagcctgggtgacagagtgagactctgtctctaaaaataaataaataaataaataaataaataaataaatatgtgtgtatatatatatatatttctcatctatgtacatttttaagcttagcagcatattttttagtgagatccagaataataaaagaatccaaacatttttcagctgcctaatagagaaacaaattctggtaaattttttcactggaatactactcaacatttataataaatatatttctggtacacagaacagcaaggaaaagtatctaagtatttatgctgagtaaaataagccagacaaataagaatatgtactatattactccatttatgtaatttatttcaaatgaaaaaaatctaaagtaatatacaaaagatgagtagttacctgggaaaagggtagaataaaggaaggggaaatgtggaaacatacagaagaacaagagaaaatgttgaggggaactcacttgtccacctcagtaatgatgacgcttacatcatgttttcaattctacactttaaatacgtgaagtgtattatctgccaattaacactcacaaaatttattgcaagcaaacaaatgaaaaattagaccaaaagcggtggtataaagatacaaaatatccattaaaagtcagaaatatatgagaatttgcctcctgaaccctagttctctccttatttttaggtgaatgctagagtgccacaaaaatcactcaagttctcaatacaggaagtgggttccacaaagcacactaggcatgtccaattcttacctggagttggttcagggagtaactggggccactgatgtggagcacaggccaagctaccagggctcattcatctcagacatgagacacacacagcccctcctccgtgtgtgggtttatttcacatctgtaaatggagaaaccattgacttctacagaacataatttacacaaatatgtaaaaatataatagtgcaaaatgtttatcacaacacattttcataataagacagtgtattttccaaataccataattgtcacccaattcctgcggggccctgtcattttatctggggtctgccatctcctcagggttcccaccccagagctctctgtgtagcaggagacacgcaaatagggccctccccatgctgatgaaaaccagctaaaccctgaccctgcagctctggcagaggagcctcagccccgggattcccaggtgtttctgcttggtcaacactgaacatacaggattcaccatggagttggggctgaggtgggttttccttgctgctattttaaaaggtgatttatggagaactagagctattgagtgtgaatggacataagtgagcgaaacagtggatatgtgtggcagtttcttaccaggatgtctctgtgtttgcaggtgtccagtgtgagatgcagctggtagagtctggagcaaacttgacaaagcctgggtgtccctgagactctcctgtgcagcctctggattcaccttcagtagccatagcacgcactgggtcccccaggctccagggaagggtctgcagtgggtcccagttattagtggtagtggtagtaccatgtactacgcagactctgtgaagggccgattcaccatttccagagacaataccaaaaactcactgtatctgcaaatgaacagactgagggcagaggatgcagctgcatatgactctgtgagagatacggtaaggagaagtcagtgtgagcccagacacaaacctcccttcagggtacctgggacaaccagggaaagcctgggacactgtgcactgtgctgaccccaggggcaagtgcaggtgctacaagggctgggtttcctgtcttgatctggggctgccttgttaccaaattacccgagggaacttctctagatttgcaattctgtactaacatttgatgtctgtgactgctaaacttccctcacatatttgttttttgtttgtttgttttgttttgttttttgtaacaggaagacccatcctcacccctacagaagcccgagtgtcaccttgggggcagaaatgaccctgccttggtcacattgatcagtgtcctgaggaagcccagtggaacctggggagtgttttccagtcaggctcagggcagagacctccgtggaaatctctgattagaataggtttgggattcagacttgggccaagagggagtctcacccatgggagggtccttaaatcctgacagtttttacagctgttctccctcctctggcaaaactgtgcacatctgactcagaactgatccagctggcccttacttgctaatcaatttttcttctctctacacttcattctcatagttcccttttcttcccttcccagaaaacagagagtgtgttttctgtggtctaaatctcagggctcaggcctgttacctggaactcaggtgtggcccaggctgtggctcctgtgagacctggggaggctgaggggactttcccactcaccattgcctggacccgcctgctgtcttctgtgcatggaggcatttgggaaatgaagtggacattagtcactgaggggataatggtagctttctcaaatgagatactgatgtagagctgatcttctgtttctcacactgtcacagaatttcctccttcatctgtgactttggggaaagctaaggatggacactctattgtgctgtgagctctgggtgacagcaattggagggtctggctaggcaaatcctacagggtttcaggtcaatggagttggaatttctgggaagacctacactgtcatcctccatggagtcccatcatcatctcttatgctctgatggaatcagccccacctaggttatctaggacaatcttcctgacttaggaaaaaaatgatggcaggctttactaacacttatattataggatcagtacaacacctaggttagtgtgtaactgaataaatgactctatgagtcaaggggacacataaaattgattgttgccatgacatttatttatttatttatttatttatttattggaaaccagagttttattgttactgaaatgagtctcgccaagcattcaagaatgggattttttaaggatagcttggtgggttgggggcagccagtgagtcatgagtactgattgatcaggtcagagataaaatcatagggagctgaaggtgtcttgtgctgagtcagttcctaggagggggccacaagatcggatgagccagtttattgatctgggtgatgccagctgatccatcaagtgcagagtctgtaaaatatctaaagcattgatcttaggctttataatagtcattttatccccaggagcaaactaggaagggttagaatttgtagccaccagctgcatgactcttaaaacataatttctaatattttggctaattcgttagtcccccaaaggcagtctagtccccaggacgaaggagatttgttttgggaaagggcagttattgtctctgttttaaactataaactaaactaagttcctcccaatgttaggtaagcctacacccaggaatgcacaaggacaacctggaggtttgaggcaagatggagcaggttaggtcacagctctttcactgtttcagttgcagctttgcagtggtggcttcaattcctccctttgagttttgaccttatcgacttgttttgtttctctttaagtgatggttttataaccatctatgaaactctaacaggtgctctcacatgcagatttctgattaaaaactctgaagatggttacaatagtatagagataaaactatcaaatagaagactatcttttttgacttttcacttaaaatgttgcccaagaaaacttttcttttgagctatttatagctttcaacaattgagtatagtcctgtacataaaatttggagaatatttgtttctctctgtccactttctccagaatttggaaactctttgtgaatatccttaacttatggcaatatgatttttcataagtgcagtaagattttttttttttttgcaacaggacacaattggagaaactggttattttaccaaggctttgactgtaatggcgtgcttcaccttaagcaatcgaacttgacttatacagccaataagagccccttgggaaaactggcctgtaccttgtccacacagtctttgtacaaggttcctgaccagtggtaagtaaagaatgtcactttctaacaggcccaagaaccccatgttttcctgggaccccagaggaaaaataatttaccagacttacaggtatttgatggtaaaaactcatggctgggcttggctttaaaaaagtcttatctgagattccttatggaacagagttccaccaaagccaattttaaaagcctgtgtaaacaataattatttgtattgtgctttatgcaaataataaggccatgaataataagactaaagtttattttgcaaataaatcagtcctatcttgatttgttttaaataaaaatggggacaagagagaaaaaaattatgctttaaaaatatagtacacctgttgtttgctgttcttgtttttttttcttcagcagtttggacgaaattctaaattatttgtaggctacaaagccataaactaatgcgttcaaatctttacttttaaaactgcgaattgcactccttaccccagttctcattatgtactttatagtatgttgttccctccaatgtggtgctggaattatagatgacagcactgacagctttgccatgcaagccttggaaccccacgcaggcctgcgtgagtacactcagacagttgcaatgaggttccagtcctcttatcttgaggtcagcacctacccctactacgccccaggtcatcaataaaaagttgtaacagtcttggcccttcttacatcttcattatccaacaccatgatttttgttttttgccaaaacaattgccaaatatagtcataatcataggataaataattttgctgaaatatatgtgttattattggtcttttgagatggaaagtccaagactggattatgctttcatgcatttttcataagaagtacttccactcttttgacaggaaacgcacagggggtgacatgtggctgcagaagctgatggcatatggtagaaatctgtccctgagtaaaggagagatggacggaggattgggtgaaacattcttaggtttctgtgctgtgcaaggaaggtgtaaaacatatttgagtctactacaagtcaacattacccaagggggaacccctgtgactccagcaatgactctgcctcagaatcactaaagagtccttcctttcattagagtggaccacaggatctgggccatagcatagacgtcagaaagcagcagcttgacacctgatccatgtgcattttcctgcctttaaagggagggagagaggtgtattctcagggtcaacacactctttgttgatttttacacagaacactggcatttactttatttcattgaaagatatatgaacagatgtgtgtctgcaaatgattgtaattttcacatttattccaattgcataatttttaaattctgcttgatgtcctggcacacagttgtgttttctataggtatttttcaataaatcaagaaaatacattttccactttcactggcttttctccatgtgcagaggccttgagtagatcatgtctgactattagtctgttttcatgctgctgataaagacataccagagacttggaagtttacaatagaaagagttttattggacttacacttccacatgactggaaaggcctcacaatcatggtggaaggtgaaaggcacatctgacatggtggcagacaagagaagagagcttgtgcagggatctccctttttacaatcatcagatctcgtgaaactcatgcagtattacatgaacagtgctggagaaacccgcagccataattcaatgacctaccactgggtccctaccatgacactgggaattatgggagttaaattcaagatgtgatttgagtggggacacagccaaaccatattattttgccccatggcccctcccaaatctcatgtcctcacattgcaaaaccaatcatgcctttcctacagtcccccagagtcaacttgtttcagcgttaactcaaaaatccacagtctaacatctcatctgagacaaggcaagtcccttccacctataaacctgtaaagtcaaaagcaagttacttcctagaaacaatgggggtactggcattggataaacacacccatccaaatgacagaaattgcccaaaacaaaggggccctctgcaagtccaaaatccagcagagcagtcaaatattaaagctccaaaatgatcccctatgactccatttcccaaatccaggtcatgctgatgcaacagatggtttcccttggtcttgggcagctccacccctgtggctttgcagggtacagcctccctcctggctgctttcacaggctggtgttgagtgaatgtgccttttccaggcacatggtgcaagctgtcagtggatctaccacactgggatctggaggatggcggccctcttctcacagctgcactatgcaataccccaatagggactctgtgttggagctctgaccccatatttacctttctcactggcctagcagcggttctccatgagggtcccactgctgcagcaaacttctgcctggacacccaggtgttttcatacatcttctgatacccaggcagaggttctcaaggaccagttcttgacttctgtgtactcactggctctacaccatgtggaagctgccaaggcttggggtttgcaccatctgaagccatggcctgagccctacattggcgtctttcagccatagctggagtggctggacacagggcaccaactccttaggctgcacacagcacgggcaccctgggcctggaccacaaaaccacttttgcctcttaggcctccaggcctgtgatgggaggggctgccgtgaagacttctgacattcacaggagacattttccccattgtcttgaggattaacatttggctcctcattacttatgcaaatttctgcagctggcttgaatttcacctcagaaaataagatttcttttctactgccttgccaggttgtaaattttctgaacttttatgctgtttcccctttaaaactgaatgcctttaatagcactcaagtgggctttttgaattctttgctgcttagaaatttcttctgccagacaccctaaatcatctctctcaagttcaaaattccacaatttgctccagttcccaatgagttcctcatctccatctgagaccacctcaagctagaccttattgttcatataactatcagcatttttggcaaagcaattcaacaagtctctaggaagttacaaactatcccatattttctggtctttttctgagccctgcaaactcttccaatctctgcccgttacccagttaaaaagtcacttccatatttttggttatcttttcagcaatgtctcactctactggtaccaatttactgtattagtctgttatcacgctggtcccaagactggacaattcataaaagaaaggtttattggacttacagttccacatggcttgggaggcctcacaattatggtggaaggtggaaatcaggtctcacatggtggcagactagagaagagtgcacatgaaggaaaactcccctttttaatccatcagatctcatgaaactcattcactatcacacgaatagctcaggagagacccatgcccataattcagtcacctcccatcaggttccttccatgacatgtgggaattgtggaagttacaattcaagatgaaatttgggtggggacacaaacaaaccatatcactgaccttctccgcatcatctctcatgaccccagagaaagagcagagatttgtctggggtaggagctgctcctgtggaacttagaggctgcagacgaccccagtgcagttttatggagtaagagagttttcccatgtctgggaacttctagcatacccactgccagagattgctggttggctgttattgaggggttcagaattagatcacctggtagcctatctcactgcagccccattgtgtaacttaccaccaatggccttcacgtgaggactcaatgttaactgttctgacctcattttcttacctcctttatttgtaagtttggttacagatttttttttactttaatttcagggatatgtgtgctgaatgcgcaggttttagtttcttattcaagccttataattgctcaactgatcaggaataatacaacatgtatgcagttttggggaaatataaatgaacatccatgcaaaattttttgtttggatatgtccgtcagttacacccctatgaacataatagccggtcctcaccagaaattgctggtcctcaccgatctcaaaagcatctagatcttcaacttcctagccttgagaattcagaaaacaatgtttatgatatttctgagccacccatttaatggagttctgttatagcagctgaaacagactaaaccatttaccaagtctcagtaagggcagtgaggatccaccatgcttgagagacaagcattactctctcatttgcagctcaggatgacagaagcatgatcatgagctgatctgaaaagaagatgtggctttctctccctcggatctcagttgaagccatggtgtcacatctctatggtggagactaaattccagtctgtgatgtaatggatgcctgcctcctcccaccctcacttacgagacagagtttccatgccatgcgttattgaccaagaaccaagaaggactccaattattctcacccctgctcacttgtatggcagaggttctggggatattcctgggagaggcataatgagactatttaagtccacgattcccaaacagttttatgctcttaaagcaggagtatcactttgagatatatgaataatttcatgtgcactaaggtggaggctgttatatttttataggtaaagatgcatggcataaagacagagatacagcactctggaaattgtgtgactatgtttgcagttgactgtgaataatttttaccatgaagttatcctaaaacacataatatatttttactgtaagtaattaatgaaaagctgacagctccacaagagcaatatccacttggtttagcagagagaatgagaaatagcataatttaagaataatcagttagacactgtgccatgtgcctgtattttcaactagtgaggatgctaatgtgggaagatcacccaagcccaggatttcaaggccagcctgcaagatattgctagacccattttcttaaaaaaaaaaaaataacattctgggtcatgacaaacctcaaaaactgaccctctaaataggaacaaatttaattgcattaaaatgtggatgaatttttgacacaaaacagtgacagcatgccagcaatgagtacagaataacatccagttgttatgttaagagatacagactccgaaaaagagacatcaggtagaggctgtcaaaggcctcactgcctaatgactgcttttccattgatactgtgtgtatatcccggaatgcacctgtgaatgaggacatcatgtctttcatagtgtgagagaaagagacattactacccatctgacaaaggattgatcagaatataccaggatctcagacaactctataggaaaaatatctagtaatccgaataaaaagcaggcgatatttatttcttaaaataagactttcaaattgcaaacaggcatataaaatgtgctgtgtaacactgatcatcagaacaatgcaaaacaaaactacagtgaaatatcatctcatctgattttaaaatgatttcatccgaaagccagacagaaacaaatgctgggaaggatatggagaaatgagaacactcataacctgttggtgggcacttaagtttataaaaccactatggagaacagtttagagtttcctccaaacctaatagtagtgttgtcatataatccagcaatcctgctgctggcatgtactccctcccacaaaaaaaaaatgttgtttgcactaccatgtttgttatagcactgttcgtaatagccaaaatttgaaagcatcctaactgcccattaacagatgatggataaataaaatgtggtacatatagcatatggattaatattatgccataaagagaatgagattttttcatttgcaacaacgtggatgaaactggagttcattatattaattgaaataatcccagaaccgaaagacaaacttcacatattctcatatatttgtggaagttaaaaattaagacaactgaactcgtggagatagagagtgaaaggatggtcaccagaggctgggaaggtctatggtagatggggattattggggatgctcaatggatgaaaaaagtggttagaaataacaaataatacatagtatttgataacacaacagactaagtataatccttaataacataattatagattgtaaaataactaaaagtgtataaatggaatgttggtaactcaaagaattaatacttgaaaggatgtaggaaccattcatcataatgtgagtattatgcagttcatgctatatcaaagtcaggtaccccataaatatacacatataccatttacccacaaaaattcaaaattaaagtatttatgtatctcatcttctgtatctatattacattaaacctaagaagatactggtttcttcacactaccaagatccacatagacatccgtagcttctttctttgcctgtccataatctgacattgaaaaatgaggaaacctttcctatcatatgacattaatttacttagtgcacaatttcaaaatacacaaattgtgttagaattattaaactgacccttgttgaaaatatgtttatcgactagaataccgtgcttatatgcagcttatttatattttacaatcacaacatcaaattatttccaaagatacttgtttctgatattcatgcccccctttctgcagtgaaattagtacaaacctgtttatcattgttagatatttttatacagctttcattttattctgtgtttcatgaccagctaaatacttttgaagttgtatgcatttaggttaacactttgtctcaaaaaattatgagttttcacaaattatttatgccatgtgtttatcattgaacaccatgaaaatagtttcattgtgattaaaaagtgtgtgtttcacctaatccacacaccttttccccagattcctggaaaaccacaaaggtttactggatctatatttttgtctttggcaaaatagcctggctattctcttagcttcttctgcaaagcatcaagattcaccttcactgactgcagcatttattgggccctgatggctggaggagaggggctggagtgggtggtagccatgagtgacccaagtggaagttctcagtggtgctctgctccagcacaaagaagattcacagttcctggggacaacacttaacatcacaatctcccttaaaattatctactggaaagctgaggagtaggcagtgtattactgtgagagacacagtgagggacatatgggtgagtctagacgcaaacttccctgcaggaagacaagaggggactttgtggtaaatggtgctcagaaccactaggggacactcagaaccactaggagacactcaggatagcagaaggtgctcaggatgccgcagggtgctcaaaacactaggggtgctcaagaccagcagggggcactcaggacaccaggagacacttaggacatcagggggcgctcaggacaccagggggcgctcagcacaagcaggggccacagaatgacaagggtgcattccagaccaccaggaaacactcaggaccaacaagagattctcagaaaccaccaggtgtaacaggaccacctaaaggcccacaagacaaccaggagacactcatggccactgaagaacattgaggacaccaggggttcagggccaacagggagtgctcggggccaccatggggctttcagtaaccacgagggaatcaatcactcaggacaccacggttttcttaggaggcagctccacatcaggtgcctggggaaggtgacgtttgcttttagacctagctgattcctgagctggtcaagcaaaagtcttcccacgatctctcactatttcttccttgtaacccatggtttctttcacatacaaatcattaacttaggataggaattcaattcaacttttaaccttgcatatttttagaataataatagcaatagtaattcaatgtgttttgataataagaaattgtgtatgcctaattcaaactctggttccacgcatgggtttttgtttcttgtgctgtgccagtcacactacagtcaatgcttttctaataataactcaacaatgtcacggtgttaagtttcctttcattttgtctgccatttgtggagatgaaacaccactttcacgggtcagttcctccactttggttgggttctggtcttctgctcttcacactgtttctccaccttcccttctgtcaaatccttttgtcttcctcagtctcctggcaaagaagcaacaaatctatttattttgtctcctccacgtctggtgaatctgttcacttctcttcatgatcattgaacccaaccatgtttagaaggataacagttcaccttacaatatgctcatgtaggtcaggtgcagtggctcactcctgtaatcccagcactttgggaggccaagacgggtggatcatctgaggtcgagtttgagatcagcgtggccaacatggcaaaaccctgtctctactaaaaatagaaaaattagccaggcatggtgtcgggcacctgtaatcccagctactcgggaggctgaggcaggagaatcacttgaacccagggtgagaggctgcagtgagctgagataatgccacttaactccagcctgggcgacagagagaaactccatctcaaaaaaaaaagcatatgttcatctatccgcagactctctgacatcgtcacccttttctagggtcctgcagacatcaccccacaacatccagtccttttcctaagtaccacagagtgggctctgcagctcctgctgctctctgtgtgctcagcgctgaggctcaccagtgctttgatgatgaagttcaaatccctaatgtgtttgcaattctcagacaaccctctagcaagctgccattgtgagtgcattctggggatcctgggctgatttcaggtccatattgctggatgttctctagcatccaggcgtgttggcaaataaacatctagaatttgtattgaaaatttgtggaaaatcaatggtagaaaacaatcctaatttctaaataagaacattttatcctgactttataaaaacacaatgttaatttaaccaataatgtaataaaatgtgtttaaagtgatgtttatcttgttattagatgtattaataattggtattttaaagtatactaacagcataaatgacaaacaaaccaacacagcgattatacataaataccattgtacattaattaatttggcaagaatggcatttattttcatttctaccaaaccttgcctttaaatatgtttgttaattggcattaggatagtgaaacaatcacacagagcaacaacattttggaatattacattatactataaaatagtacattcgattcaattatataattaaaataacattaaataaattcatgttttggtttgatatttggatatgtgttcatttttgtattttctttttttgtatcttttgtagagatggggtttcaccatgttggacaggctggtctcgacttcctgacctcaggtgatttatcgggggaacccacccccaatatttcaatgtagggtctttctattttctgtaagtgtcggctggtctgagaaataaagagaaagagtacaaagaaaggaatgttacagctgggccaccgggggtgacatcacatattgataggtccgtgatgccccctgagccgcaacaccagcaagtttttattagggattttaaaaggagagggggtgtacgaacagggagtaggtcacaaagatcacatgctttaaggggcaaaaagcagggcaaagatcacatattccttccccagggtattaattactaatattccttgctgggaaagaatttagtgatatcttccctacttgcacatcagtttataagctctctgcaagaagaaaaatatggctctattctgcccgaccccgcaggcagtcagaccttatggttatcttcccttgtttcctaaaatcgctgttgttctgttctttttcaaggtgcactgatttcatattgttcaaacacacatgttttacaatcagatttcatattgttcaaacacacatgttttacaatcaatttgtacagttaatgcaatcatcacagggtcctgaggtgacttacatcctcagcttacaaagataacaggattatgagattaaagaaattatgaaagtattgattttgggaactgataaatgtccatattaaaatgaaatcttcacaatttatgtttagagattccagtaaagacaggtgtaagaaattataaaagtattaattttgggaactgataaatgtccatattaaaatgcaatgcctagggccaacaaaggagtcatattaatatgaaaaataatagctgaatattttggaaatgacacatgcagtaacaaatgtctatatgaaattaagaagatattgacacaaaattgagaaaaaattaacataattatgctcactactggtttataaaatgcctataataacactttttaaatcatattatagaaaataaaataactatataaatagcactctctttgcttgattttagtatttggtgcttcaaatgttttttatacaaataaacattggtcattttttgatggtaatttcaatattttcttccagaatacatgttcataaatgtaattgaaattgtataattttcagaaacttattttatcagttgtgacttgtatttttatgatagactttttacatttatatacttttgattcagaataattatagataaaaaaattataaagttaatacagtgtgttcccatctccaagtatctcctaagatgaatatcctctatcatcataagacatggtgttaacacatttacattgataagtgtaaatatattcaataccagaccttattttatttatcatttttccaataatttctattgtaaatgaaaaataaaattctaagcttcctcaagcaactaaatgaactcaaccctcagccaagggaatttcaaagtaaattctaaaacttgttccagcaatgatgggaaagtgagaggtcagacatgcctcattacatgctcctctctttggaattaaggcaccagtggccagcattagtactacaacaaagatcttaagacgggcaaaactatatttttgctgtaaacactttctatagcaaaaagacatcaaattacaacttgattctagtatagcatcacatgacaaatagcaaaacctaatgatttattctgtatgaaatctgctacctggaggcttcatctacataataagaactatgatctccaggaccccttatcttaatccagacactcagttgtaatgattgtattaccttacatttcaaccaattgccaatcagaaaatctttgaattctcctatgtcctggaaccctgtgcataaactttcctgcctttctagactgcataaatggtatagctcacatgtgttgattaatatctgcctgtaacttctgacccactaaagtatataaaatcaagctgtaatcaagccattttggacatgtgttctcaggaattcctggggtcgtgtcatgggccttggtaactcatatatatctcagaatgagccattttaaatatttcatagtttgtcccttttagtggatatcttcttttcttttttttgggacagaatctctctttgctgttgctttcgtatatttgtttgtttccagattccatcaaggccatcagtttgaattcagttgtcttgttcctttattctcttctggtaaatgacagtttgtatttctgaagttttctagttgaatattttatagataaaaatttatcaagtaggttgatagtgccatttgggactcttatatctttacctatttaatcattgcttgttttctcaatcacaatgagtgttgatttctccatgttctatacatgttagtctattttctgttccaaatccatttattaggtcttttaaaatggattttggaaaagttgatcctattattttatgcaatatttcacttgagttgcaaaggtattctttttatgattattttgtctgaaattaacatagctattcaagttttctttggtttatattttcatggtctatatttttccatcttatttcttctctttgtgaatatgttaagaagttttcttggagaaagataattgctgggtcttttttttttttagtcaactatgaggaattattttttaatgatattacccttttgtccaataatggttgttttgtctttttacaataatatgtattgtttctattaatttattatttaattattattgatgaatatcttattggttaccataaggataacaataagacatttctataattgaattctaattcaaaaatgtagtacttctttctctttcttatttctttgagacggagtctcactctgtcgcccaggctggagtgcagtgggacaatctcagatcactgtaagctctgcctcctgggttctcgccattctcctgcctcagcctcccaagtagctgggactacaggcacctgccaccatgcccggataattttttgtatctttagtagagacaggctttcaccgtgttagccaggatggtctctatcttctgacttgtgatctgcctgacctggcctcccaaagtactgggattacaggcatgagccaccgtgcccagcctacccctttatatatagaacagagatattataactatatatgtctaattcctcttttctatcccttttttattttatcagtttgtaattacataagctataaaaatgtaatattgacatttttataattgctttacacatttatgtaataaagaaaacacaaatgcaaaaactaaatttaaacctcatttttttcattgttgacaatctttatcttttggatacattcaggtattggatgtatatcatatggctgctcatctagaaactctgctaaaacgtctatggcaagattaatatgctgggaatagattttctcaggatttgtttgtccgacagagtatttatttgtctttgatttatcatctcaagagacaatgtcaagaagatgctgtttctgcaaatgggcaatctgcaaaccaaggacacgtcactacattactgtgcaagagaagcacatgaggaaaggccggtgtgagacacaaacctccaggaacacctgggctaatgagctgcagggggcgctcaggacccactgatcagtcaaccacagaggggagtgcaaaggttaggactgctttcctgcaagcattgaaaaaagaagaaaaaaactccgtctgacagtttctccaaggaacttctgtaattttagaattctgtgcctaccaatgacatctccaaatatttttttaaaatattgtgtttggaggacatactctcacatggacaaaacacaaattgacacagagatgaaaagccctcaaccatagtcaccaaaattggagacatgtagaagctcactgggacctgttgagtcttctccaatcacactcagaacagagaccttagtgggtctcccttagagtagtcattaaggatggtgataacagcctaaagatggtagaccatggtcagtgtcatatagaatatggggaccctcacaagttttttgtctgacccttctcctgacactaaattatgcaaattaataacactgatctggtgcttcttttgattctaatttattttatttttagttgtcgttctcacttttcctttggattttcctgctccctggaaaaggtaaatgtggtctccgtgacctcaattcaagggctgaagccctttccctgtagctcagctggggctcaggctgtggctactgcagccatgtggaagaggctgaagggactttcttcactctccttgctcaggaccatccactgtattgtgtataggcttctctggaaatgcaagtggccatttgtagtgaaagaaatatgtttgtctggttaaaatgggaggtggatgtagagttaattggctgctacataaactgtccttctccaccagtgcttttaggatgagattgtgaaatttgtaagaatcaaaatggagtcacatatgttaaaaccctgacaaatggattcaggaagtgtagggagaattcttacacacatatccctgacaacaagaactatcataaaatagttcttgcaaaaagaccaacatgacctcataatcatgacttctgcaaagacttctactcagaatctacttgcccagccttagattaatgccatctgaattacactgatcatgttactatcactggtcctcaccacagatgcaacaccctcctgagtcctgaaacctgactccatcccatagagtagggcacagatgaggggaatgcaaatctccaccagctccaccctcctctgggttgaaaaagccgagcacaggtcccagctcagtgactcctgtgccccaccatggacacactttgctccacgctcctgctgctgaccatcccttcatgtgagtgctgtggtcagggactccttcacgggtgaaacatcagttttcttgtttgtgggcttcatcttcttatgctttctccacaggggtcttgtcccagatcaccttgaaggagtctggtcctacgctggtgaaacccacacagaccctcacgctgacctgcaccttctctgggttctcactcagcactagtggagtgggtgtgggctggatccgtcagcccccaggaaaggccctggagtggcttgcactcatttattggaatgatgataagcgctacagcccatctctgaagagcaggctcaccatcaccaaggacacctccaaaaaccaggtggtccttacaatgaccaacatggaccctgtggacacagccacatattactgtgcacacagaccacaaagacacagcccagggcacctcctgtacaaaaacccaggctgcttctcattggtgctccctccccacctctgcagaacaggaaagtgcagctgagatacgttttcctgccagggcctgcatttcccatccccattagactcagagccctgtcttcctccttcttctttaataataaatggcatgactcctgttaatagttcatagaagcagaagctgagtcctgtttgtcaaacattcagcatgaaatgttcatgttacctgggccagatgcatcactggtatgtggccgccagtttaatgggctcatactactccaagcggccgaatacaaaacagcagaacatatgcctttattaaactgcaggaaatgacactggagaaaaatgtggggataagggagcaggaggaattgtgaaaattcagataatagcttttctcgtagagagaaaggtgcgttaataaaataattttataaaacaataaaacagatggaatgtgtccccatcacggagtgtctcacagtaacagtgcagaaataaatttctaaaaatgtcgtagggtaggtgtgatagacaaggcttatttccacacagggagcccataaatacccatgtaattaaaaatccagctcttagaaagggagtgcctcaacttgacatcagaaacccacgtcagtgagtctgaggagcaatgtggaaaagaaatggaaaattcaacaatacctttcttatgaaaatcctagctcacgtttcaacatgaaacataactgtctacaattttaggaaaaccatcccatggcaacaagtcactacactcaaaaggtactgagctaacagagttccagcagtgagcaggtcagtgctgaaatccccggagaatcaaggctctcaggtacgttgtacaaaacccagaactgagccacacaatctatggtcaagtgatctttgacaaagtcaacaaaaatatgcacggggaagaggccacgctcttcatgccatgttgctgggacaattggactgccatatgcagaagaatgaaactggacaccaacctgtcgacatatacataaccataagaaaatggactgaaggcttgattataggacttcaaaatataaatgtactcgaagaaaacaccaggagaactcctctggacattgggcttagtaaataatttaccacaaaaacctcaaaagcacaagcaataacatcaaaaatagatgaatggaatttagttaaactaaagagcttccacacagcaacagagtgaacagacaaattgcagaatgctaaaaaatatttgcacacattgcatctggcaggggactgataggcagaatttacacggaactgaaacaaccccaccacaacaacagctatgaaaaaacaaataacctcattaaaaattggcaaaggacacgagtaggaatttttttaaagaacacatataactggacaagtgctaaacatcactgattatcagggatatgcaaattaaaactgcaaagaggtatcttacaccagtcagaatggctactataaaagaagcaaaaatagcagacatcggtggcgatcaaaggcaaagggaagtctcagtcattgttggtgaggatgtagatgagcacagcctctatggaaaacaatgtggagatttttcaaagaaataaaagcagaactacctttgattcaatgaccccaccattgggtaactacccaaaggaaaaataaatcatcatatcagaatgataaccaaacttttgttttcctgcagaactattcacagtagcatagatatcaacctaaggaattaacctgtgtcttacaacagataattttatttaaaaagtcacatatatatacaattaaatactatccagccatattaaggaatggaatcatgtattttgcagctacatggatggaactctgggtcattattttaagtctaataaacgagaagtagaacagcacacaccacactttttcacttataaatgggagctaagtaatatgtgcacaggcccatagagaaaggaatgatggacattgcagactcagaaacatgggagagcagaagttgggagaatggtgagaaattacttaaagggtatgatgtacattatttggatcatggatacattaaagccaagacgactatgcaatatatatatgtaacaaaattgcagtcactccccgtaaatgtatacgaataaaataaaaaaaaatacaattgaaatgtgaaattattaacagttgatcaacaatcctgaaaattaaaacgtgtgatgcaataaatgaaaataattttagttgaacttcatcaaattttaaaacattttctattcaaccgactatcaagaaactgaaggacaagcttcaggggagaaagtatttgcaaatcatacatctaacaatgtaattataataagaaccctcaaaactcaacagtaaaaagaagcaatctgtttataaaataggcaaaggtttgtgcaaactttctatcaaagaagatgtacagatgacacatcagcatatgaatgtaattttccagtagagaaattcaaatcaagaccaaaaggagacacgactttaggctttagaatgaggaaaaataaagaagaaatactgacagtaccagtgtcagtgagcatgccaggccccgagagactaaaatattgctagtgcaaaatgaaagagtttctgggagaactgtttacagtttcttataaaattaaacatgtccttaatccatgacctagaactctcatccctgagtatgtcctacaaaggattaaaatcatgtgttcacacacacacgtattcagatgtttaacattgtgtgtgtgtgtgtgtggtgtgtgtgtgtgtgtgttagaaactaaaaacaacatgaacatctttgaaaatttgacacaaaccattacaggtgaactccagactttcttctgagtgacagaaggcctgcctgaaagatccccagagacacagtcatggatttcactgtcaccctcacatgtcactggcttgggctgggctctctctggctcttccctgaccaggaccagatgttgagctccactacctgcagttggaagtttatattttcaacaatgcactgagggctaagttgctctacagactgaaccaaacaaacatgggcgcctttgaacaaacagtgcctgacatttgtactgaccccaggagaactcttcccgctctctttcttcttggttctctcctgcaggccagcagccctgcagtttagcctggacctctcatgcatctacccatctcctcccaagtgcattttaccacagcctccactgtttttgtaattctccacactctgttgtaaatgaagtcaggtccttcgagaccagattcgggactctattttatgaccaaatttcagcctcacccccactcctgagacagagctcctaaataagattctgcaggtggagattaagagcgtttttcttcctcaatgtaggagatgagtgctcagtggagggatggggaggagctttccactttaccagcatgcagatcctgctggggtggaccctctgccataggagcagggctgggaaccaggcagccaatgtcctcctccttggtgctgcactcagggcagagcctgcatccatgagtggggctgtgtggaagaagtgagtctctggttctcagtaagtcttgtctagaactgagcctcagcagcatgacctgtgggcaaggtcggagggccaatgtcctggcccctggggaagagtgtgctctgctgggagctgggcagaaggaatcctgtctacttggctgcagccatctgtggtggaatttacatcatgctgagctcgggcatagaaggaaggaagagaatctttgatcaaatatcaatatcatgtctgaccttactgaggttttgtagattatctcgaataaatgttccttcactttctgtatgttgacagggcctttccagacccgttaatttttcaaaattaatctcaccagtttcatggaggcatggatatatcgagctccttataccgtcatgtgagatgtggaactgtttccttcactggttataaaataatgggttgacttttttcccaacactttacagataccatcaattgtcctattgcttatatggttataaccaaagcaatgctgatattattcatttctattctattgcaaggtatgccccctctactcgtctccaattgctggcatgtatttccatttgtctgtatgttttagtaatttgaatatgattcacctaagagtgtttgtgtgtgtgtgggtatgtgtgtgtcgtgtgtgtgtgtgttaagggcttatcctgctatttggtgttctctgacctgcactgatccatgacttacaatttctctaatttggaggaaaaaatagagggaaagtgagtttgagtccagacacaaacctcactgaagtgagcacaggattctaaccccaggggtgctcaggacacgctgatcacaagagccagcctcaggggcaggtgcagatggaggctgagctcttctttcccgtcagcactgtggcttcttctccataaaaca

SEQ ID NO: 34 - DNA, 157090 bp, Human
tcttcccttgaggaatttatctgaattcatgattttttgcttatctccaaagtctctgaaatgaaaatgtttgttttaataaaagaaaaatcttctcacatgtgtaaaagacagtttcctacagtcgcttaatcttgtctttaaatgtcaattatcaatgcttctgaagtaaatcagctaaatctataaaagacactttgtttaactcaacactgcagcccagcatgacagcactgaaagggccagcaagcagcaggcaggatacggtgcatgccagacactggggcggaaggagttagtatccagtgcaagagaagaaagtgcccgtggtggtcactgtcaggacccaagctcacagctccaattgcaggtgaccccatgcaaaggaagagataccctcaccaatgtttagtgtggatgtcgagtctgatggtgccacattcacacaccacgtgaatatggaaagatttaccaactccattattgaggcgtctgctgagggctgcacaggcctctcaataaagtccaaactggctcaatagagcaggaaagaagctgcctcagggtttttatgatggtttggtgttgaaggaatggtggggcttcctactaaggggaaggagcttgtataatttgaacctaatactggcatccagtgaggacacttccatgattttctactaaatttcccatgtgtgggggacaaaagtgaaggaaaaggattaatcctgtcatcagtaatgaggcatcaaaatagagtctgatgacttattctacttagcaacttaagcaaatgagtgaaaaatgaggtaagtgttcactctgggtggacagcaaataggtctgcagaaaatagagtttttttaagtgtaagcacataacaaaaagaaagagaagaacaaattgaacagggatcttggaccaatgtcctgggtggaagctcttcactctgtgagatcatcagcttgctctgagggtctcgggtcaagtccttcttcaatatatctcaggccttacaggatacatgggaatgctcagcttggtgtccttcactagggaaaagaaagagaaatcagactgtcactgtgtctatatagaaagggaagacataagagactccattttgaaaaagacctgtactttaaacaattgctttgctgagatgttgttaatttgtagctttgccccagccattttgacccagccactttgagccaacctggagctcacaaaaacatgtgttgtataaaatcaaggtttaagggatctagggctgtgcaggacgtgccttgttaacaaaatgtttacaagcagtatacttgataaaggtcatccgcattgtctactctcaataaaccaggggcacagtgcactgtggaaagccgcagggacctctgcccttgaaggcggggtattgtccaaggtttctccccatgtgatagtctgagatatggcctcgtgggatgagaaagacctgaccgtcccccagcctgactcccgtaaagggtctgtgctgaggagggttagtaaaagaggaaagcctcttgcagttgagatagaggaaggccactgtctcctgcctgcccctgggaactgaatgtcttggtataaaacccgattgtacatttgttcaattttgagataggagaaaaaccaccttatggtgggaggcgagacatatttgcagtaatgctgccttgttattctttatgccgctgagatgtttgggcggagagaaacataaatctggcctacgtgcatgtccaggcatagtaccttcccttgaacttaattacgacatagattcttttgctcacatgttttttgctgaccttctccttattatcaccctggtctcctactacattcctttttgctgaaataatgaaaataataatcaataaaaactgagggaactcagagaccagtgctggtgcaggtccttggtatgctgagtgccggttccctgggcccactgttgtttctctatactttgtttctgtgtcttatttcttttctcagtctctcatcccacctgacgaggaatacccacaggtgtggaggggcaggtctccccttcgtacttgagcagccttacaactgggtgggtttatgaattaattcctcggttgcattacatgaaaaatcacacaatctacaaattttaaaaaataagcctttactttttataaaagattacagccatttcacaggctgggaagcacagccattggtgaagacgagagacaggcactcccaaggaggagcggtggggcagaaactttatgctgaacgtgttggctaaacagacataatcaacggattacaggaggggctatgcgtgttcataaaggtggtcatgacacatgaatatgggagcaaacatacacgtcacatgtgacccacttagcagtggggacttagcatttaaatgtgttacagttaggccctaagtgccaaaagctggagcaggggcacaaagaccctcagagcgcagcctccataaatggccagaaccaggccatggtcagtggtctctgatcaggagaaaattcctgaaatcaatctggtgtcccatccaagctggggttatggctgtggaatggggggtcagttagtcaggggatgagctgcagttggttaaatcgtgcttatctcaggatcagtgcttattttgctgctacagaagaaaataacagtttattctttaagagttggggtgagggatgtaacccctgcctggcatggccttaggtcttgtttataacggggcatcttattgccccggagaatctgttctgtcagtcttatgatctccattttaatgttagtgttggtccatgttgtctctgaaccacaaaagggagtgggtataatgaggtgtgtctgatctcttgttctgcccagctgggaactcagtttttaggtgtttttggtgcctccttggccaagagggggaaccactcaatctcatggggtgactgaaattttacttttagtttaaagtttataaatatggacctaagtattgacattctaaaagtcactcctttgttttggctaaaagtacttggcaagagtccttgaaatgaggttcaagagcagtattttctcatgactttatttgcaatagacacatgagagactgttgaaaagatgaagtaccaaagtagccttaatctgttggtgaatggagttggtataatacagaaatcactttcaatattttgtaacacatgcatgcatgcaataagacagcggtgagcactgagtgtaaagtctctaaaggtacgatctttcagccaccaaataatagtgtaataacggacatactctggaggagctgactataataccgtaacaccacggggagaaactttggccaaggaagtccaagattttcttttccttttcctttttttttttttttttttttttttttgttgttgttgtttgagacagagtctcactctgttgcccaggctagagtgcggtggtgcgatctcgactcactgtgacctctgtctccctgattcaagcgattcctgcctcggcctcccaaaagctgatattacaggcatgtgccaccacacccagctaagtttttcatatttttagtagagacggggttttgccatgctggccaggatgatctcgcactcctgacctcaagtggtcctcctgccttggcctcccgaagtgctggtattacagcgtgagccaccacacccagccgagattttcttaaagttttgaaaattttaatttaagggttacaattttttcaacatttccagaaagctgtagacagtattattctgtgttatatgagtgattgtagttccttccatttttagatagtattacaaacaattttagggctgcttgctttaaatagatagatgatagatggctacatacatacatacatacgtacctcgatagagatatagttgcaaacataaatacatagatagatagagttacagatgtattttagttattatgctacttttttctttgccttttcttcctatgttatgttagtcaggtctccaggacttaggagtgcatttacaatcccttcccttgtccattttgacgtgttctagacaatgcgagaatcctttgtgtgtggatcacttccaagtcatgcactacccttgcaataaatgtgtttgtgtatgtctttgccttactgacaagctctgctgagtgcagttatttctgccgtctgagctaactttacacttggtagagaaatatattctagatggaggcttccactattaatttaaattactaattcataacctccagcttaattattgaggtataatctatcagagatggtattagaacaaaggtttccaatgaaatctaacagaagggatgtcaaaaaattttcctaacttaggtaaaataaccctgagcccattcttagtatccagccatgtctcctatctatcacactgaatcccacactaactttgacctgacttgggacttgtaagcttcaaatatgaccttttgattgcaatgcctctaattcaggacgtgtggttattttagccaagagtaaagaaaaccaaatttaactcgctaaaaatgacaaagattaaaacctaatgaaatggaaactgggatatgagtggctccagacttggctattttaagagtctatgtgcccaggtgatttcttttctccattttacacacaggcaaacccaaaacgtcagcttcatctcccgttgactctcatcatctcgttcttcatcagcttgcttagaatgttgacttccagctgcatccatgttgccacaaaagacatgattttattctttttctgtgaatgcatagtgttccattgtatacatgtaccatattttcttgatcaaattcaccatgaatggacacataggttggatttatgtcttaggtattaagagtagcatagcaatgaacatgtaagtgggtgtattttttggtagactgatttattttcttttgtgcatatacccacatatgagatggccgggccaagtggcagctctgcttcaaatacttttcaaatctccagactgctttccacagtgcttggactaattcacattccacccaacactgtacaagtgtttcctgttctccgcagcctctctccagactgctttccaagattcctctcctccactttgacactttggtatatccatgtgtgtcctctctggttcagccagggacagagaaccaggaagacatcatgcattttctagagggagctggcttggggaatcaacgaccggagtagaaagtgcctttgtccatgcatcacaggcctgagggccctgggcaggaggtcaggaagagaggatgaccagacagctggggaaaccgggatgaataaagccagtttccttcctggtgaggaggggcaggtcgaagcctcgtgtccctgtagggatgaagcacactcacctgccactgctacctgccaatcaggtgacctgcagagcagcagctcctgagtcactgatggtgacttcctcctcctccaaaccctctaggatctgtgcttctcagagtgggaaccccagcaggtccccaagttttcaatggattcacctagctagtgtctctcctcagccccatccccaggctcctgccctggtgctgtgtacagtgtcacaacaggggtgacagtaacagctggtgcctgcactttccaggccaagaagtttgaaagaagcaagtcacagggccagccgggatatggggtaatcacacaaatttccttcttggaggaagtgctgggaaacatccttgagtcctcctcagctcacgtgcagctgctgctgttcatcccagtgcgggggacacatgagccctccccatgcccaggatggagctgtttcaatcacagcaggatgggaatgtgtcttctctatgggggcttttgaagcacagctctcctgttcctgagatttgagatttataaagacaagtcccacagagtggacctgcacaaataagacagtacaggatccccaggagagacatcccataagagaagggacaggcgggtcccatcacagacactcatcctcagaaaccctgaccggctactcaccttcacaggtccccagttcctgatcagtgcctgtgtctgctcctgagaagagatgaaaactcaagacaaatacttctcatgatcataggcttaaaaattctcaacgtaggaaatcaaatccagtagtttatcaaaaagttaacacactgcaatcaagtaggctacattctgcaaaagcaaggctgctttaactgctttccacagtgcttggactaattcacattccatccagcactgtacaagtgctttaacctatgcaaagcaataaatgtgatgctctactaaacagaatcaaaagcaaaaaccatgtgagtattccagcagatgcaggaaaaaagctttcaatagaatctaacaacgcttcatgataaaaaccctcaaaattatagacattgaaggagcacacctcaatctgatgagccgtctatgacaaacccatggccaacatcatactgaatgggcaaacactggaagcattttccttaagaacagaaacaagaaaaggatgcccgctctcaccacttctattcagcctagtactggaagtattcaccagatcaggcaagagaaagaaataaaaggcatccaaataaaagaaaaagaagaatgcaaaccctctgttttcactgataatatgattctatatgtagaaaatattgaaggctctgccaaaagtctcctagtattgatacattcgtttaggaatgtttcaggatataaaatcaatgtacgaaaatcacagtaacatttctagtcaccaacaacgttctggctgagagtggaatcaagaacatgctctcccaatagccaccaagacagtggaatacctaggaatagagttaagccaatgagatgaaatatctctaccagaaaaacagcaaaacacatgtgaaaaaaatcagagataaaacaaataaatggaaaaataaacattccatgcttatgaatttaaacaataaatatatgaaaaagttttaaaatttgtgattaattctacgtagcaatgccatttttttcaacatttacagaatattgttgctggtaatagcagtttagcatttgagtaatggaaacaccttacagaatcactttataacagttgcttcctgtagtgggttgcttcagttacctgatgaaaacatctgcatgtcacaggttgaaaacataaaatatgtctatcaactgagaaggttgtaggcttttgtcaaggaattacttcaagtcattcagaaaaacagcagacagtaaacgaaacttgttcaaattccatggagagtcaaagctgaagaaaatccaactagaagtgtccaaaggcccccaaggctcagttcctcggcaagtcccaccttctcaggttttccagaattttgtttttaactgatttacactgagtgaagtagattaccaggagttttccattattttaacataaaatcgggggctaagtgttgttattttataaagacatctttgaatctctcaggaaatttacctcctgagggttcagataagatcctactctaggttaagattacatgtttggcgcaatgaactggtacaaatcttactttagctttcatgttatctatttttccgcactgacttccacctttttattagtcaagtatatgggatggaagagtgcttctaagaggtccttaacttgcccatttcaatggattttcaagaagacatgagaaaccactttgtttgcaaagcatcccaaagccatgtcctgctccagaaacgtgatctcatttcctggtcgtttcttaactgacacgctctaatcagtgcatctgggccaatttgaaatgaggtgaagaaatgtgtcctaaagtaaagctaacattgtaataggaattcgtgtttaaaaacatttagttttattattgggcaggatccatcaacatataacagttgaagtttctcaacaggagtttaataaatataaggaatgtacagaagtgtttcctaatttaaataaaatgtagtgattacctaggctgtgagtgcaatcttggtaatcttctatgtccatgcccatcactctgtgcaccgcaaactaattttgacctcagcagaaacgggattaattttcaaattagtaatttttttccaatttaatttatttagatgattatgaatgactattttagcagaaagagaatcaaggaaacttgaactaaataaccagaatttaaaatgacaaacaattcaacaagatgccaggatgtgagtggctccaggcccaattaattcaaaactttatgtgcccaggttctgtattttcccaaaattacacatctccattccagcttcatgccacagttgactcccaccgtgtaagacatggcgacaccattcccaaaggtcgtgtgcaattctgaaaatggaataagcaaggagaggagatgatagtttatattctcctctgaggaggaagaattgcctcaacagaccacttctcctgcatctgtgactagaactatgtcacaggcacacatggagcaaaatccctcaaggggataatacggtaacattaatcagggtgatcatttttaatactataaaattcatagatgacactgcattccagcctgagggacagagcaagaccctgtctctaagaaaaaaagaacaaatcaatagatactgataccaacattttagataatgaaattttcataatgtaattttaaatacactcacatcattacataaatcttcccagaaatattcctagtcatgttgagtttcatcaacttttccagtgttcaaatctagaaatccaatagactcttgaggataaatcaaaatgagggcagtgaaactggtatctgctcagcacctgttaactcaggaggactcaatacacccttgcacactgctgcttctctgaatggctcacaaggactccagctcactctccatcctcctcaaacatctggcccccacttgccctaagttgactctctgctcttagtctgtgctctgaagtcttcccagaggtgaaagtgagctgtcagatggaacttccctctcacctcagcgtggaatttactgctacatttaactatcactctttccataatggttgatttcttggtctgttcattacagatcaaaggcatctgatttgaatctttatttctttgcatttgtctccatgacaattttgggaggttttaccgccagcactatgacacgatgtagtaacatgacacatttgtggttaacaacacctacaaattcagaagctcttcggttgtcttcccagcaaatatagctgcttcttttctgtgtatgaacacatcctggaaacacgtacacacccacatagatatatacatgcctatgacattttcttctctgtaagtgaaaattaacctcaatttcatacgaagttcatcatttccctgaaggtgaaggtaggtcgtttttcatctgttctaacaaatgctcagacaccagctagtaagtgaggagctaccctgcttctggatgttggatctgtctcttcccctttgctttaccacagaagattggccacttgtccaggtcccaagaagagagtccaggtttgtcctgataatatgactcatccaacttctgataactctactgttacacacattcatggaggtagcctattaattacataattcactaaacaaataccaaatacccacattgcaataccccatacccaagggtatgttcatgcattcagtgaaggaaaaggcttttcagagacagatagatcaggctagattggtcaatatatgggtgaaaacactggacttgaatgtatctgttttcccccatgtcacatgtgagacctgtcagacaggaccagggttccttgtgcactcagaggtgagggctcacagaattcctctctggtttccaggaaaggtaactgcagtaatcttggtaatgagaatatcctccagtgctgacctattatagagtttacatatgaaattttcactgcaattcacaatctactctttcacacagaagtgtacagaggtcaggacacatcctcagggtcacacattgagaatgatgaagatatgtcccacgagtttttcctaaggtctcagaaagaattccaggactcaaaaggtctcagagggcagctcccagtgccttagttaaaatggtggctcaggcctgtaatcccagcattttgggaggccaaggcaggtggatcacctgaggtcgggacattgagactagcttggccaacatggtgaaaccttatctctactaaaaatataaaaattagacggggggggttgtgcatgcctgtactcccagctactcgggaggctgaggcaggagaatcacttgaacccaggaggcggaggttgcggtgagccgagatcaggacactgcactctagcctgggcaaaggagcaaaagttcatctaaaaaatttattttaatttaaaaatttttaaaaaatggcccactccctagaacagagagattccctctaaacatgatggaggtcccgaactatacattaagtgaatcctggtgtgtctgaactcacatgattattacgttaagctgctgttccaatctacttcctcacctgggaaaagaggagccagggcatggctagttgaggccccaggaagagaactgagttctcaaagggcaaagcaagcatcctcatcccagggtgagcctaaaagactggggcctccctcatcccttttcacctctttatacaaaggcaccacctacatgcaaatcctcactcaggcacccacaggaaaccaccacacatttccttaaattcagggtccagctcacatgggaaatactttctgagactcatggacctcctgcacaagaacatgaaacacctgtggttcttcctcctgctggtggcagctcccagatgtgagtgtctcaaggctgcagacatggggatatgggaggtgcctctgatcccagggctcactgtgggtctctctgttcacaggggtcctgtcccaggtgcagctgcaggagtcgggcccaggactggtgaagccttcggagaccctgtccctcacctgcactgtctctggtggctccatcagtagttactactggagctggatccggcagcccgccgggaagggactggagtggattgggcgtatctataccagtgggagcaccaactacaacccctccctcaagagtcgagtcaccatgtcagtagacacgtccaagaaccagttctccctgaagctgagctctgtgaccgccgcggacacggccgtgtattactgtgcgagagacacagtgaggggaggtgagtgtgagcccagacacaaacctccctgcagggaggcggaggggaccggcgcaggtgctgctcaagaccagcagggggcgcgcggggcccacagagcaagaggccgggtcaggagcaggtgcagggagggcggggcttcctcatcagctcagtgctctccctcctcgccaggacctcagctgtccccaggcctcctctttctttattatctgtggttctgcttcctcacatcctcgctgcaggcaagaaagaagggagaaatttctctgtttaccattaaggttttaacagtcactggcacctttttttcaacaaattcccacaaggcccattttaccttcttgacaaagtatttcaaggcttctcaccatctcttgattggcgtcatcggctgcatcgtgtcctgctcttaaattcatgtgatgaaaccccaatcccagtggctctgtatttggagagagggattttaagaaggcaaataagttaactgtggccataaatgtgggaccctaatccactaggactcttgtccttatgggaagtggaagacatcagaggcctctctctccacatgcacacagaggagaggccatgtggggacgcgctgcatgagaaggtggccctttgcaagcctggaagtggcctctcaaaaaactaaccctttcttcacccagatcttggacgtcaaggctccagaacaataagaaaattaatatttgttatttgaaacaacctagtctgtggtatcttctgatggaaagccaagcagattcacagatacaattgtgttagctccgtctcctggagggagaagcagcccaccgaggctgacacatctctcagattatttttataaagaaaaatagatccaagatgaaaaccccaccacatttctgctgagtcattcacttagcaggcttctctgagatcagccctggggggctgtgttctaggtcatgtctctcactttccactatgagaatccatgtagatcatgagaaccagccagatggagtcctgatcccggcccaccttctgctgctccccaagtatcccaaagaaaaccactccagcgtcacccctgtgtcttctactctctaaaatcccactaaagctgaccttaaaccaggagatatttggggccgggctcttgttctcttcttcttagtcttccataaggtccaggtgctgagtaaagcctcagtaaagattgagcttcagttcccctaacccacatcattcccttacatccttgtcatgcatctgtcctctgtgggcactcagggcaggttacacaggaattgcctgaagctggcctcaactgatgtgctgagaccacgggtcatgcacatgtatgattccgggtcatgcacatgtatgattccaggtcatgcaggctctactgcaggacagacctgtgtcctgtggggcacagacagctgctgaccccgggtctcctctaataactcacacacctggtgtttgtgtgtgtccagatggccccatgagcacagcacactagggtggccaaccttacaggtggggccgtcagatggaatggacaggctggtcactcccatcatcagtgatttcccagtgaattttaaataaattaaacaaaattaacaacaaaggggaaggatatgtacctgtctctgggaggtatacagggtcccagaactgtgctgggagtgggtgtgaaacgcccttttgtgtggaaagccctccagcatgagtgaaagctgaaggaatgatcactgtgcaggtggaggatgataggcagctggcagggtacatttcctgaagctgttcctgggtgcatgatggttggatggcccatggtgttgagggctggactcacataggaacaaggaaattatcccatgggaatggcagaaaagaaaatggagatggacacccctggagacagcttattagatttggtggaggaaaaatagaaatttattccaatgaccccagcattttcagctaaataagagttgcattaatagacagaattatgaaaggaagggagaaggagtttatggagggaaaaaaaaagaagataaattaaaatttaaaactatgcaaatctatcaattggcagataacagagtggagctgatgcagctacttccttgttctggaaacctgccagagacacttagcattcctgtaaggccagtctagtggtgatgaacttgtccactttttacttttttggggaacttctcaaacctcctgcattattgaagaaaagctttaatccatgtaacgtatttatttggaagtttcttggctttgtttttattttcagcaacttgaacagaatcatgcacatcatgatatttcggtgaacaacaggccacctacaggacaaaggtctcattagattataatactgtattttcaccgcatttttccatgcttagatatgttcatctgtataaacatctaccatggtgattcagctgcccacagtattcactacacttacatgacatacagatttgttacctaggagcactatgctatcccacgcagcctgggtgtagcaaggtatttcatgtaggtttgtgtaaacacactctatgatccttgcacaatgacaaattgcctaaggacacattgttcagatgtattcctactgtttttcatttttttttagatggagtctcactctgtcacccaggctggagtgcagtggcacaatcttggctcactgcaacctccgcctcccaggctcaagcgattctcctgcctcagccttccgagtagctgggattacaggcatgaaccaccacgcccagctaattctttttttctattttttagtagagatgggatttcaccatgttgccctggctggtcttgagctcgtgacctacatgatccacccactttgccctcccaaagtgctgggattacaagcgtgagccactgcgcctggccaatgtatccctactgttaagccacaaatcatcgtatctcatttctctcccttttttgtccctgttaatattttcatgttgtgcgtgcattcttctcctagctcagtgaacatatttataaggtttactttgaattttctgctaggtaatcaatgtatctccttttaatttgtgtcagtttctagtgctttttttgttaaataatttggaccacttttttctgttttgtgattattgttattattattattttttactttctctgttgctttctcctcattagaagaaaaagctaccgtaatcactcttcacagaatatgcccagggaaaatgccatcacctatcaacccaggctgtcattgtggcatctcttaaaacttcataatggttgaaattttttgttgttgttgttattagtggcactcagacctacagaggattttaagttttgctcctactctaaattaggtggcattgaaattcatcctgcaggcagtctctgataaagtggaggaattgggcagttttgttatgcatatggttcataaaaataatatgagtttaaggttttctcagccaagtgctatatcctgatattttataatcacttctttgaatctctcttgggtttatcttttgaaaatttagatcagaatataaaccaggtttgaggctttttgtttggtgtaaacatctcctataggtcattgcgtgaaaaggcacagagtctatctgaggaggagaactcagggaagcctcacaacaacaggggagacaaaaccgaggtcactaaaaaaatatgaagcttctggctcctgcagcctccagacatgccccacaccctctcattgcacagaaatgaattcctttctctttcctgagtgatctttgccaagattcctctcctccactttgacactttggtatatccatgtgtgtccattctggttcagccagggacacagaaccaggaagacatcgtggcttttctagagggagctggcttggggaatcaatggttggagtagaaagtgtctttgtccatgtgtcacagccctgagggacacgggaagaaggtcaggaagacaggatgaccagacggctggagcaaccagtatgaacaaagccactttctttcctggtgaagaggggcatttggaagcctggtgtccctgtaggggatgaaccacactcacctgcccactgttacttgccaacgaggtgacccgcagagcagcagatcctgagtcaccgacagtggctgcttcctcctccaaaccctccaagatctgtccttccaggagtgtgaacctcagcagatccgcacgttttcaatgggtccacttagctagtgtctgtcctcagccccatccctgggatcctgtcctggtgctgtgtacactgtcacaatagtggtgacagtgacagctggtgcctgcactttccaggccaagaagtttgaaagaagcaagtcacagggccagcctggatttggggcaaacacacaaatttcactctgtggggaagtgctgggaagcagccttgagtcctcctcagctcacgtgtggctgctgctgctcatcccaggtgggacacatgagccctccccatgcccaggatggagctgtttcagtcacagcaggatgggaatgtgtcttctctatgggggcttttgaagcacagctctcctgttcctgagatttgagatttataaagacaagtcccacagagtgaacctgcacaaataagacagtgcaggatccccaggagagacatcccatatgagaagggacaggcaggtcccatcactgacgctggtcctcagaaaccctgaccagctactgaccttcccaggtcccctgttcctggaacagttcgtgtgtctgctcctgaaaagatgcccatcaagagtccccagggttctgcccccttccttgatgtgcctctgggagtggggctggctgggctgtgggtctggcgtgaccctctccacaggtcagcggctcagtgcaggctgcaccgactcggtggggctgggctgtggctgaccctcccagggggagcctggactcttcttaggggtatctgcaggatcccaggttctgggagaacagggaagccacagtgtgtgcagggccccatctccagtaaagtgtttgctgtcgctctgttgacaagggcatatccccaggcctaggggcactgtgggcgcacgaccaatgcgcgagacacagggagtaaggcacagttccctcccattactgtgaggacactagacacagtgtgtgtgtgtgtgtgtgtgtgtgtgtgtgtgtgtgtgtgtgtgtgtccattactgtggggactctaaccaccgtgtgtgtgtgtgtgtgtgtgtgtgtgtgtgtgtgtgtattaggagttttgcagtggcctctgagacccatgatcttgcaggtttagaaattatctgatgagatgttcatccacaggaaccgacaagagattaggtgttctcccaaagcccctggaagctcctggactcactgtgagtgtggactgatccagtgcttccagagctccacagaaggggctccctggtggtttcatagaatccttgcttggggtgtttctgcagagttcactggctttcctacgaccaatttaccattgcaagcgatggcgtcagcagcacatggtgtcacgtgtcactaaaggagcattctgagccaggacacagccacttcatactggggggaaaatgctctgggagcccagacaggagcctctctgcagtgcaagggctgggctgcagggggcgctcaaggcccacccagcacaggctccagccccagagcaggtgcacaggaggctgcggatggagtccccttaagatctgtgtcattcttctaaaaaaatctaaaataagtatttgacaaaaactgctgaagagtccataaatatcctattcaactgcaagaatttatcaatttacactggagatttctaaccctgctacatatcttaatagtaagcatctggaggtcaattaagcttttattttatataaataagtgcaacttttggagaaacacactcatcccccaaataacacattcatgtattaaagcctagaaatattttaaattacctctgagctattcaagtgtgggttcccagtgaagtcctgttctagggaaaattgttctccagtgggagaagctctgtcaacatacagtttagggatatggcagggcacacatggcctctaaggggattatagcttgaacccttagcatcctcctgttgggtaatccatgtgtcatctctccactctttctcatgctgtgttaggtatgaaatagcatcgctcatgaatatgcaaataactgagatgactatagatatctttgtgccctgagagcatcacccaacaaccacatccctcctcagaagcccccagagcacaactcctcaccatggactggacctggaggatcctctttttggtggcagcagccacaggtaaggggctgccaaatcccagtgaggaggaagggatcgaagccagtcaagggggcttccatccactcctgtgtcttctctacaggtgtccactcccaggttcagctggtgcagtctggggctgaggtgaagaagcctggggcctcagtgaaggtttcctgcaaggcttctggatacaccttcactagctatgctatgcattgggtgcgccaggcccccggacaaaggcttgagtggatgggatggagcaacgctggcaatggtaacacaaaatattcacaggagttccagggcagagtcaccattaccagggacacatccgcgagcacagcctacatggagctgagcagcctgagatctgaggacatggctgtgtattactgtgcgagagacacagtgtgaaaacccacatcctgagagtgtcagaaaccccaggggggaagcagctgtgctggcatggaggaaatgacaaagattattagattgaagactttctcagaaaatgatattaagtcattaaggaaaaggaacaatataaacgtgtatttgagaaattttaattatttgagagatttttcatacaatatttattctgcaagcaaatttcagggattgaattaataaaactgatacagaacttcctctgtaggtatctgtgtaaacatcaatttctgaatcagtgttgtaaatattttggaacacacacacaaatcacattttatctctacttttatctctatttttaaaaatgccaaaaaaactcattttgtgcatgtagcattttgaattcccaccatcaatgcatgatagttcttggttttccacattcatattgccatttatcattatgagaattgtgtgttttaaccattctaataggtgagtaatggtatctaatttttagttaaatgcacatttccctaataaaaattcacatttaacaattttcatataatttttgccaagatgcctcttctcatatttggttcatttttaactgcattgttttcttttgattagttgtaagtttacttgcatattgattataaaatcatttaacaaattaaaagaattcatttaacaaatatgtgacttggaagtattttctccaagtctgcggctgtcttttactcccttatcagtatgtattgcagaaaagtgtgtgtgtgtgtgtgtgtgtgtgtttatacaaatttagatttaaaaaatgtaaaatgttattcatccacagatcatgtctttggtattatatctgaaatctcattataaaatacagtaatagcaattactttttccacgtctctaatctcaggctacaatcaactcatgagtgtttaagcttcacctacttgattagaggactatcaacctaacatatttggaatacttctgtaaaaagatgtgttcctcttcctattatttctttatttgatcacttattaatatgtgtattggtttatggatgtctatttcatactctgaagaagatccatgctacattattcattttatttttcaaaccaccacggctttattatgtgctgggagctcattgagtttggatcctgcatccttacagctcacctcatgcttttgtttttgaacacttccctgtttcctgctattataataaattctaaactcattttctatattatctttttcatacatagaatcagccatttttctaaagattgcttgcttctgatgttaaagaatagtatttaaaaaattgtaatactgggtatgtgcattgttaatgtggtataagtacttgcaggacctctcaaccaactggcctagtaaactatgtatctaaccttctgtaatgtgattacattaaaaatgagaacacactggtctctctacccaattatgctaccacatggatctttctagccttccttccttgactgtctataacctctcactgcaaaatgaggaaccccatccaaccatatgccattttattacttagctgcacaatttcaggacacatgcatagcagtatcagaaatgtaaagctgtacccttgtaggaaacatgtttatctactagaatagagtgcttatgttcagtttctttacactttaaacttacagagtttcctcattttcaaagttccttaggtcagcaacttcattttccactttcttcagtgaggtcatttcaatgacactgtataatttgatttatttgaaattctataaaagccaaaactgtagtcaagtgaacaacaacatatagaggatattcgaggagtttagagactggtataaaataagttaaaaagacactgtttaagaagattaaaattatttttagtgatatgcaatggttcagatatgacacaattaatttgtctaagcacatagttttgtgatggaaaatataaacctaaatatatacaattaaaaaaaaatttagcagttcattaacccaaggatcaaatgcagattgtataaaattatctcattacttattttgtgagggtggagatttcatgagatgtatgcaacaaagaatgaggtaattttcctgatttgcatataagatgttgccattcactaaagacctttaattttttaaattgttttttttttaaatcaattttctatgtgacccaggtttttttctcttgacaagcaaataacccacaggattattttctttccttggttgagaaatatttccccaaacttcagctcagttcaggcatacactgtccctgaatgggcatttaccctcagatgggtacacacacctgtcaacatgtggactcttctgtcagacaaacgcacctttactcacgtggattcttctctcagacaaacacacatgtccccacgtggactctttcctcagactaccacatatgttcttacatttactctttcctcagaaaacagacatttcctcatgtggactcttgtctcagacaagcaaacatgtctccatgtgaactcttcactcacataagtacacatatgtccacattgactgtttccttacacaagtacatatatccaatgtcgaattgttctgtggcaaaatgatctcaagataatgataatcataaaccccctccctgacaaggcatagatctgtatttttttcattgcaacctaactttgccttattgtcaagaacagtagtttgcagctctaaatataccaattagagacaggtgtccattttctctggaaacgtatttttatgttcttactggacatatttgttgataatgtttgctattatgaagataccccaacagtgtccacattagagaataaaaaatagtaatgggcagattaactctgtgcatccagacccagaaatcctttgaccttgacttccctgaaatgtagacacagaggatggatgagcaatgctgagcagtgcacccatgaccacaaaaagaaagacgtggaaatgtgtcccctccacttctcatgaaaggcagctcatcccctgttccctcaggccctggcgaggagccaccccatgtctgtgcccttcctcagtgtccacaccgtggggtctgcattgatctggattctcttctcatccccgtcaatattagtgtccttcgtaaatcaggtccagctgtggcttctcctcacggggctgttctcagtctgtttgctgtgttcacggaagtcctgtgtgaagtttactgatggagtcagagggggaaaaaatttacagcccagtggtgagactctcctgcaaagcctctggtttcacctttactggttacagcatgagcttggtccagcacgcttcacaacagggataggtgtgggtgccaacagtgagtgatcaagtatgaattctcagggttactttccatgagtacaaataaattaacaatctcaagcaacacccttttaagtgcagtctgccttacaatgaccaatctgaaagccaaggacaaggtcatgtattactgtgagtgacacagtgagggaaaccctgtgtgagcccagacacaaagctcaccgcagggagacaggaggggactatgtggtagatgctgctcagaaccaccagggggcatcaggaccatcagggagggtgcacagaaccaccaggaggggctcaggacaccagggggcgctcagaaccaccagggggccctcaggacaccagagggtgctcagaaccaccaggaggcgctcaggacaccagggggcgctcagaacactaggaggtgctatgaatcactagggggcgctcaggacacaagggagcactcagaaccaccagggatagctcaggataccagggggcactcggaaccgccagggggcgctcaggacactagggggcgctcagaaccaccagggggcactcaggaccatcagggagggtgcacagaaccaccaggaggggctcaggacaccagggggcgctcaggaccacaagggggccctcaggacaccagggggcactcggaaccaccagggggcactcagaaccatcagggagggtgcacagaaccaccaggaggggctcaggaccaccaggaggtgctcaggacaccagggggcgctcagaacactaggaggtgctatgaatcactagggggcgctcaggacacaagggagcactcagaaccaccagggatagctcaggacaccagggggcactcggaaccgccagggggcgctcaggacactagggggcgctcagaaccaccaggaggcactcaggaccatcagggagggtgcacagaaccaccaggaggtgctcaggacaccagggggcgctcagaacactaggaggtgctatgaatcactagggggcgctcaggacacaagggagcactcagaaccaccagggatagctcaggataccagggggcactcggaaccgccagggggcgctcaggacactagggggcgctcagaaccaccagggggcactcaggaccatcagggagggtgcacagaaccaccaggaggggctcaggacaccagggggcgctcaggaccacaagggggccctcaggacaccagggggcactcggaaccaccagggggcactcagaaccatcagggagggtgcacagaaccaccaggaggggctcaggaccaccaggaggtgctcaggacaccagggggcgctcagaacactaggaggtgctatgaatcactagggggcgctcaggacacaagggagcactcagaaccaccagggatagctcaggacaccagggggcactcggaaccgccagggggcactcaggacactagggggcactcagaaccgccaaggggcgctcagaagaagcagggggtgctcagaacaccagagggtgctcagaagcaccagggggcgctcaggacaccaaagggcactcatgagactgtggcaagggggtgctgagaaccacaggatgtgaccaagacaccaaggggcactcagaactgccagggggtgctcaggacaccagaggattctcagaaccaccaggggatgctcaggaaactagcgggtgctcagaaccaccggaggacactcagaaaaccaggggatgctcaggaaccaccagggggcgcccacgacaccagagggcagtcagaaccaccggggcatgctcagaaccaccagggggcgctcaggacaccaggggatgctcaggacactaggggcgctcaggaaccaccaggggacgctcaggacactagtagggtctcagaaccaccaggggatgctcaggacactagggggcgctcaggaaccaccaggggtcacccaggacaccaggggtcgctcaggaaaccagagggtgcccaggaaaccaggggaggttcaggaaccaccagggggcactgaggacaccaaggggtgctcagaaccaccagggggcgctcaggaaccaccagggggcgctcaggacactagtaggcactgaggaaccaccagggggcgctcaggacactagtaggcactgaggaaccaccagggggggctcaggacactagtaggcactgaggaaccaccagggggcgctcaggacactagtaggcactgaggaaccaccagggggggctcaggacaccagaggtcgctcagaaaaccagggggtgctcagaaccaccagggggcactcaggaaccaccagtgggtgttcaggacagcaagaatggctcaggacaccagggagcactcaggacctccaaggggctctttggaggcagctccatatcaggtacctggggaggatgaggtttccttttccaccttggtgattcctgacctggtcaagcaaaagtcttccccaggatctcttacgatgtcttccttgtaactcatggtttctttcacctataaaacattaacttagaacaggggttcaattcaacttttaactctgcctattttcagagttatactagcaatgatatatctcagtatattttttttaattgtgtatattcaatccaaagtctggctctatgcacaatttttttgttttctgtgctgtcagacacactattgtaaatgcttttctaacaactcagcatatgcatggggtccagtttcttttcctttcatcggctgtttgtgcagatgaaacaccactttaagggctcctgtcctccactttggcccctggtgttctgcttctcaaactttctccatcttctctttttctgtcaaaatattttatcttcctcagtctccatgcaggaaacaggaagtccttttacttcctgtcctccatgtctggtaaatcagttcacttcttttcatgatcactgaagccaaccaagtttaggagagtaacagttctccttagaatacactctacctgcagaccctctgccctcatcacacttttctagggtcctgcagacataacccccacccattcctctttttccctaagtaccacagactaggctctgcaacttatgctaccctctgtgtgctcagcccaggggctcagtagtgctttcatgaagtccaaatccctaatgtgtttgcccactctcagaccaccctccagcaagctgccattgtgattgaatcctgcaaagcatgggctgctttcagtttcctattgctggatgttctttattataaaggcatattggcaaataacgactagagtttgtattgaaaattaacgccaaaaagttttttaaaaagtttttcaaatagaaaagttctatcctgcctagtttaaaaaaatacaatgttactttaatcaatgatttaataaaaatttaagtgatgtttgtcttattagttattcaatttattaataactgactgatatttaaaaagtaaatactggctgggcgcagtggctcacgcctgtaatctcagcactttgggagggtgaggtgggtggatcacctgaggtcgggaattcgagaccagcctgaccaacatggagaaaccccctctctactaaaaatacaaaattagctgggcgtggcggggaagctgaggcaggagaatcgcttgaacctgggaggcggaggttgcggtgagccgagaacacgccattgcactccagcctgggcgacaagaccaaaactctgtctcaaaaaaaaaaaaaagtaaataccattgtacacttaagtaatatatttggcaagaatggcatttacattcattcaaaaatgaaactgcaaatacgagttacattcaattaaataattaaaataatatagaaaaaaatgggtgtgttgttttggtgtttaatatacattcatttttgcatggacgggtatatgtgtcattgctgggctgttgtgtatgtgtgcgtgtgtgtgtgtgtctgtgtgtacaactatgaagtttaaaatatattattaaattacgtagttatattaatccaaatttatcatgttaaaatattaggaaaaaaacaccagtagagaaattacagagaacatcagcaatgcctacagcatttacaagagtcacattaataacaaacaaactagttcaaatgtttagatatgacacatgcagtagaaaacgttcacatggtattaacacaaaaatggtgcacaactgaggaaattataatacgttcatgatattggctacataaatgcttatgatagtaatgcttttcatccatcaaatgcttatgataatgcttttcatccatcatattatagatgataaaacaactctataaacacttccatcactagcgtttaatatgagatgcctcacatctttttctgaaataaataaacatctgtccaccacttcgatgatcatttcaggattatcctctgaaataattatccataataattttagtaacaatattattttcagaagcctattttataaggtctttgaactattatttttatgattgttactttatattttacacactttttatttggaataattataggttatcagaacaattgtaaggaaaatacagtgtgttcacatccatctccaagttttcactaaagttaatatgtcaaaaaaaacatgggacatgggactaatatatttacattgataagtttctgtttattcagctctgggatttatttgaattttgccaatttttaacagtttccttttttcctttttcttttctttttgagataaggtgtcactttcctattgctttttgtttgtttctttgttcaacccacgtaaccacatcaaattcagtcaccatgttcctctcatatcttctggttaatcacagtttgggttcctgctgtcttcccattgaatattctataaatgaaactagtcaaataagttgattctggtcacttatatatttacctattttatcacgtttgttttgtcaatcacagtaagtgtcgaattcgctatctgttatagatgttagcctattttctatcccagatccattggttaaatctttggtgatgccttttagaaaactgatccctttaccctatgtaatatgccccttgattcctgaaagtcttatgtctaccttgtctgaatttaacatagctaagcacgctttcttttcgttcatattttcatggtccatgttttcctgtatttaacttttctatgtagagcaaatttctgtacagagctagtagttgggtcttgctttttaaatcaactataataattctattttaaaactggtattactatttttctgttaatttctgttttaatttggcattttatgatcatgtttatttctctattaacttattgtttagttcatcttttatgaatattgtattggccctaagatatacaataagaattgtgtataatcagattctaattcaaataacgtaaaacctcttcataggttgtagagctattataacttattcttctaaacactctttctcatccgttgtcttagtttattctcagtttgcacttatatgtgctataaaatataatatgtgcatttttatcattacatagacatatattagaacaattaaaaatataaaaactacatttcaacttcattttttcattcttgaccacatgttttatttggatagattcatgtttcggatgtatatcatatggctactcaccctggcagaaaatttgccaaagcacctactgaaggatgaatgcactagcaataaattttctcagaatcgatttgtcttacagggtattcatttgactttcgctttaaatgaaatttttaatatatatagaattccagtttgactttaatttgtaatttattttcttgtactcatgtattcattattttcttcctgaagatggtcacacattccattctgctgggccttcattatagatatttgtgtgtatctattcagggctatatttgcaatttatggatgccacaattatcagagttgaagtcagcttctgctgtccacagagatttcaagttcctcccatgatacttgcttttgtgtccctgtttgatcctgggtctttatatttagttttccccagggaggctgtctgtttcagctgtggaaagtgcaccctactgacagtttaaattgatgactgtgtggtgaaggaggttggacaaagcgggacttcctccaaccttctgactgagtctccttcttatgcaggagtagtaagcatagttctggggagtggccttccacattgtcctgtccttaactctttccccagggctggaacgtcttttcccagacacaactgtttttcaccagtgtccccagctttttacccactatccttaccctaaagagtaaggatttctttcctgaggaaggagatgggaggtgtttctggatcaagtttccttggtgtcgtctgtttccttttgtttctgttgacttcaccacagctcatatgacacatgctttggtggatttcccctggaggtagtggaggtgcattcaggcattccacaggagctgctgttcttttccccagtcaacaccacaagacaccagatgaggaagttgtccgtggatttttcaagttctctaggaaaagcttgcaagcactaggccaatctaacaccattagtacatgcatactaaaaaaaaaaaagtcattaagtatttctaggttagtctgtttctatctcaaatgccatccagtggcacctgccctacgtacactagcaggtaggtcctggttctctctgcaggctcctatcttctcagatttcagttttcttgtttgcttggtgaaatcaactcagatatgttgaatgttttttctctcttttatttgtagctgttcagcttcgttgttaatgaggtcagaataaaatcacagttttctcatttttttcacattcccacactgaatagctgctttccgtataaaagccagaaactgagagaacacattgaatatccattacaggtgaatgttaaacaatttgagatatgtttgtgtactggaataaaatgctgcattacaatcaagtcatcactcattcacataaaacatggccacattctcaaataatgtagggacctgagtgcccctccatctactggcctctcctggggccctagcctggccacaccttcttgcagggcagtcttggacgccctgggatcccgcaccaaaatttctgccctggcagaacatgcctgactggtggagagctccaatcgggcagccctcatgtgcacacaccagcttacacacttcctccgaatactgtaggttcacccaggcccacgtaacttcccacatcactttgcagtcacatgtctgtataggtgggttttgcttttcttgtcccaccattgcgtggagtgcagtcccctccccccaccccaaccaccatggcagaggaagctttggtggggaaaaagccagggccgctcctgtcagcgtcccgcacttgcgctaattctgcacagagaatagcagatcatctcacacattcagaaatcactcctgcttgtggggcatgaatacggcacccgggcctgtgcccacaagtgtcccatccctgagccaacacctcctccagtgtgaccttgaacacagtcaccaacagggccccacagacgcaatgcctctgccactgtggcgaacacctgcagggaggcaggcacccagacacccactagcactctgccacagctgccacacctccaacagcccaggacagtggattcctaaccttaaggagccggagaaccaagtcagggactagtataacttcccccagagtcagagcacacagtctaggtgttgggagctgagcactggccacctaaatttttccagaaatgaagccagttggctgaatccaccttataccacaatcaaaccctcaaggtcatccaatagggtaaaagaaaataaaaatgtatccaaaggtcagcaacttcaaagattgaaggtggataagcccacaaagatgagaaagaaccagtgcaaaagtcctgaaaacaaaaagggcgccctctttcctccaaacaaccacagcacctcttcaacagcagttctgaatggggctgagatggctgaaatgacagaaacagaactcagaatatggagagtgaaaatgtagatgaatacagctatttatggagaatactataaatgttcctcaaaaaataaagaaacaaaatctactgtagaatccagcagtctcactgctggctatgtatccaaaggaaatgaaatcaacatgtcaaagagatatctgcactccatgttcacgttcattgcagcattatttaaaatagtaaagatatggaaacatcctaaattcccatgaatggatgaatgaataaagaaaatgcatacagacacaacagagtaatgttcatccttaaataagaaggaaaccctgcctctgtgacagcatgcatgaatctagaggaccttatgccaagtgaaacaagccaggaacagaggaagagtcattcatgatttcactgtatatattaaagcagtagacttgcagaggtagagtagaatgttggttaccagggcctagaggggtggactgggaaagggagatgtgggttaaagtgcacaacgttccagttagaccggaggtataagttatgcctttctaatgcacagcatgtcaactatagctgataaggtagtatatatttcaaaattactaaaaaaataaacattagaatttccccactaagaaatgataaatttgtgaggtgatgaatataagcggcttgagttacccagttcataatgtatacatgtatcataactaaacaacatatgtcataaatatatgcaaaaattatttgtaatttataataaaataagtttcatatttaaataattacattaagaaaatgaacagaaactttcagatttcaagaatattttatatatatatatatatatcttaaaacaaacttgcaacagaatatagaaataagttttacgactcaatggaaaagaacagaattcaataaaaactggctaaaagaaacaacagctgcatcattatagaaaattctggaataatcagccatataaagattctcactctcttagaactagaattccgtaggacttgtaattcctcctgacctgggtgggaggcaaaaggaagaacagctaatggtgattcagtgagttttatacctgtgtgtacttctgtgctcactcagcagaaagaaaagaagaaaagaaagaaagagagaaagaaagaaacagaaagaaagaaagaaagaagaaagaaagaaagaaagaaagaaagaaagaaagaaagaaagaaagaaagagaaagaaagaagaaggaagaaggaaggaaagaaaagaaagaaagaaagagagagagggagagagggaaggaagggacagcagaagtcattgtggtgtgtgtgaaagcacaatccttgggctcccccacatccatctctactccagtcccatcaatgtccagcaaatacattttctaagatgaagtattttaaactttctaaatcctgctagaaaacccctcagctctttcagttttgctctatcacttgaattattgaattaaatctagtttttgtgggcctatcaataccataagccaaaataacacatgaagaaattgcactgagacacatgaaaaccttctgaaagctccataatttcagatctgcattcttatttccccgaacctaaatcactgaatagagactcagaacgagttgatcttgttcctgaacgtgcacagagccaaggacatcctgtctgtctggaacagctcaggtttgttcctgtttctcctagaggatataaaatcttgagttagggaaaaacagccagggacaccctgggctttgttcttctctcccctggaggcaggatgtccttcagagctttgtcccagtgggtaacacagctgctgaggtgtacaacccacgtggcctcgttttggtcacttttgcatggtgagcctgctttgcaccatggcctacaatatgcgtgtgtaactaatctgtctccatcttcaaaatgacattattccacatcaaatctagtgcaggtgcctcacacagaacattctcaattacctccatcattcataaaattgatgccattaatttcaagtatacatacatcagactcatttaacgtattgttattctcattgtttgaaacataacttttagatcaaataattaacaataataaaaatataaattttgaagtcaggtaatgtgatttctctagttgtgttctctttgctcagaatggcttgggctgttctgcatcttttgtttttccacatatattttaggattttttaaaaatttctgtgaagaatatcattgttgttttcatagggattgtactgagtctgtagattgctttaagtattatggacattttaacaatattgaatctttgaattcataaacatggaatattgttccatcttgtgtcctctttatttcctcaatgttttatagatttattgtagtttttttttactttgttcattacacattgtatgcctgtaccaaaacatcacatatacccaacaaatagaaatatatatactattatgtgcttataacaattaaaaattatgtatgtatattgaatctattcaaaatcagaaactatttctttttactgtttgtaaggtcttgtctctaggctataaaaagaatttgtaaaactcaacagaaagcataatataaacagaattctaaaatgagtgaaaatctgaacaaacacctcaccaagaaaaaatgttatctgaaaataagaatatataaaattgttcagtatcaattgtcataaactgatactcatatttaccaaatacaaaagtaaacatgatgtatttcaacagaattgattctcaaatatttgtatactcatacagtggaatactatcagtcataaaaactatgggttattaattcagaagacaacattttaacattttttctaagtgaaggaagatggacaaaagagactaagtattgtacaattccattcatgagacctgctaaatacagtaaaattaaaaggattttaaaaacaggtttgtgataggcagggcttttggggaaagacaagagactgacttggcaaagctcaggggatatttttagggtaaaacaaactgtgtgccattgtgatatgcctaatttcttattatatttgttcagagttaatagtgtacgtttcaaccaactcggtgattttatattttctatttgctgatagagacatgttcatttttgtcaatcactttgctaaatgtggctgagaggctgttgaaatgaacgctgagcaaatgtattcaccaaatctacaagagcaaattatttgccaattgctgattgagtggggtctataatgtatttgagattgggtgtggggatgttattgtgtgagatcatgatgtttagaccatgacactctctggtgagggatcactcattcattgcacatttaatgaaaggcaggtaggaggagcagaaggggatgagtcacactcctgaccacagccacaggttattgaaggcagaactgatgtaatcccctaaggtagaccactgcccctccaaggtgaccttatcctagagttgacacacatcctgggacaccagagacaactccttctctcccctttctctgcacttcagctggaagcaactgtctcaccgagcaccttgtgttaaggaatgagagttcctgttccaggtgtgagggcccaggtgcatccacttgatccagcacaagagcaagaacagccttccagaaaatgacatcgcctgaggtataaccagctctcacctgctgcagcttcctctgaataaaaaggaaactgttgaaacttcctcataagtgtcctgctgtgccattccctttgtccccacatgttcagttgtgtctgtccagatgtcacttttgtgtagggagattagggttctgcttccagtaccagaacacacatgacctcttaggggacttcagggttttgctgacatatgtgatgatcttaaaagtcattagctccatttctacatcaaaaaacatctgaaccaaaggagcacataggctcaggcctgtaatcccagcactttgggaagccaaggcagaggaatcacttgaggtcaggaatttgagaccagcctggtgaacatggtgaaaccccgtctctactaaaaaatatatacaaaaattagccaggcgtggtggcactagcctgtaatcccagctacttgaaaggctgaggcaggagaattgcttgaacccaggaggtggagattgaagtgagctgagatcgcaccacttcactccagcctgggcgacagagtgagcctccatctaaaaaaaaaaaaaatttatatatatatatatatatatatatatataataaatatatattatatatcatatatatattttatataatatatatgtatatttttatatattatacatacatatcaatatatgatatataatatgtatatataatatataatatgtatattcatatattatataatatgtatattgatatatattacacatatatattttgatatatatatatctccaaaccatctaaatatcaagtattttttaatccatctaagagctgaaattgctgaaaaaactactccctccaaaagctgtagagacaggcacatccacagtcacagcagagacttgctgacttggaagagaagctcctggagacacattggtgagaacatttacctggtgattatgctgaatgtctggaggacaaatgtggactagggggagggtgagcactcctagaggctgtacaccccacacttgtgtggacttgccctccagggccttcaggttctcgtggaagcaattaaaatagattccctatagccatgaactggggaggagtaatcacggagaaaagatgcacaaaaagacttttctagaaagctcatccaagggaaggtattctccaaaatcttagtttatgtgggggaaggaaatacttccaaattacagacccctcctcctcagccttcctctatcacgcaaatgataaaattagccaagaggagtcagattcaaggcggtagccctgggtgcagcatctgcagaagggaggaaagagagaaaatcagctgtatcactggagattccttgtgaaggtcactgctcaggagaagagggcaaccaaaccagggagagtcaactgtaagaacataccatgctcccctgccccacacattacctcctcaacagcatcattaatatggattaaagagggcagtgtgattgctttagatctgtttgagaaagaaagtcacatactgaggcctagggtcagggtcggcggcacttcccgtgagtaagatactacgaagaaggaaaaattaggggtccataactgtgaaaatcagccacagtgtgtgtgagaatgtttgtgtttgtgtttctgtgtgtttgagtaggagttattggaacagcggacgtggagtgagctttaatccacatccatctgcagcttcaggtattctcagatgcagtattcatctgcaagagccgaaatgagaaaagagccacctccaacccccccagagttttagcctccctttgtttccagtgatccagtgcatctagacctccaggaagtggactccctggtgattttagcgattcttctcttggagccaccctgaagaggacattgggtttccaaaggcccattcactatttcaagaagtggtgccatcagctcatgttgtcactgaaggagcattctgagccagggcacagtcacttcctagtgagctacagaggctgagagaaaaatgctctgtgagacccaatgggaagctccctgcagtgcaaggtctgggtggcagggagcgctagggcctcgcccagcacaggctgcagccctggagcaggtgcaagggaggctggggaggggttcctcccagggtctgatgtcttccttttctcggacaaacatgctttaataagttaaacaagactttagtaaagactattgatgtgtctttgtgtctttcagtatacagttctatttgtaggatttatctaacctaacaagtcaatgagaatcacatgtaaaaggagaaatttctaggattttcagatatcttaataggtaggagatggagaaaagggatggttttattaattcagtgcttgccaatcttaacagagacagtagtaagacatgcagaaagcaaagcccagaaaagtatgaaggtgtcaaagtgccatttaagtatgggttcacttggaggaccatgttctgcgggaacttgttttcagcagacaatctattttagcagagttctgggcatacaaggggacacacatcattaaacaaggattgggacagggacttcagcgtcccactgttgcatggcccataaattatgtgtgttctctttctcatcttggatcaagtctagagctatgaaatagtatccctcatgaatatgcaaataacctgagatttactgaagtaaatacagatctgtcctgtgccctgagagcatcacccagcaaccacatctgtcctctagagaatcccctgagagctccgttcctcaccatggactggacctggaggatcctcttcttggtggcagcagccacaggtaagaggctccctagtcccagtgatgagaaagagattgagtccagtccagggagatctcatccacttctgtgttctctccacaggagcccactcccaggtgcagctggtgcagtctggggctgaggtgaagaagcctggggcctcagtgaaggtctcctgcaaggcttctggatacaccttcaccggctactatatgcactgggtgcgacaggcccctggacaagggcttgagtggatgggatggatcaaccctaacagtggtggcacaaactatgcacagaagtttcagggcagggtcaccatgaccagggacacgtccatcagcacagcctacatggagctgagcaggctgagatctgacgacacggccgtgtattactgtgcgagagacacagtgtgaaaacccacatcctgagggtgtcagaaacccaagggaggaggcagctgtgctggggctgagaaatgaaagggattattatttttaatgttgtttacagtatgtcattaataaattgaaaaaaagtaacaatagaagtatatactctaattatatgggaactttgttttttcagttttttcatttttttttttttttttggtttgtttgtgacagagtctcactctgccacccaggctggagtgtaacggcacaatctcagctcactacaacctccacctcccaggttcaagcaattctcctgcctcggcctccagagtagttgggattacaggcacccgccaccatgcccggtgaatttttgtatttttagtagagacggggtttcaccatgttagctaggctggtctcaaactgctgatctcaggtgatctaccctcctcagcctcccaaagtcctgggattacaggcgtgagccactgcgcctggcccaattatatgggaattgtttatataattatcaccctataagcaaaattcatggaggaggaaaagctctactgaagaaagctgataccggcattcccatgaaagtatctgtgtagaagtaagtattaaaatcagttgaataggcaaggcatggtggctcacgcctataatcccagcactttgggagaccgaggcaggtggatcacaaggtaaggagttcaagatcagcctgcccaagatggtgaaaccccttctctactaaaaatacaaagaattagctgggcgtggtggtgggtgcctgtaatcgcagctattcgggaggctgaggcagagaattgcttgaacctgggaggtgaaggttgcagtgagccgagatcacgccactgcactccagcctgggcgacagagtgaaactccatctcaaaacaaaacaaaacaaaacaaaacaaaaaaacagttgaataaagtaccttagagtcatctgttcaattaacatgtttaactccaaagaaatactgaaaatattttccaaaaaggaagtgccattttacgttcctaccaacagtgaataagattttcttttctggagccttgtcagtattcactaatgctttgctgtgcagccgttgtaatattatagtaaatgagtagcagtatttaatggttgttttaaatatacatattcttaatacaaagtcttgatgaacacttttttatacattgttttatgaggtgtgtgttcagatctatgtatgccagaaatgcctggcagcgttaatttaagcacactgtgagaatgaccctatagtttatgaagaatgtatgttcagagctctgagctaagaaatccaggagctgtcaacccagaagtttattccttgtctgtgaaggacatctgaatccctggcctatcccttggaacacaggatgtccaggtgattgatgctctttgttaaatctggaggttgctaggtagagggtgctaagtgaaaatcataatataaactacacgtgttttacaaatggtagtggttttcctgtccaacacacttttcctgggccacattgtatgcaagtcctcaatacaccctaggtcttgttcatgggctccaggtctcctcttcagccttttggacatggtgccatgcctattacagtcaataggggtctagcatgacaactggtaggcccagaacaaggtcaaagaaaatcctgcaagctcttagacaacagtgtcaaggaaggggagacctgtggggaaatcccaggcaggccatgcacatctctgtgggcccaacagctgcaatccttgatggatggggcccgctgcatgtgtacggggatgcctccaaaatgccaaaagttctggaggacctgttgcctgaggtggatgtgacaatgtgacaaagtgacagtcagattcctgagctgtggcagctgttggccactcctgactgcactctgagcaaccactgaggcagagctcattgcacaggctagggtgtgtcagccacgagaacagttgtaactataatgagatgccgcctgtagggataggatagcaaattggagaccattgtttatttggtaggccatttaaagtgttgctgactgccacaccaatgcattaggactactatgactacgtcatcctgggagcctaagtcctggcgtccgatgtagagctccagtgggaaggagatgaaggttaggatgagtccataaaggttcttgctctgcagcccctgctttgctgtctcacttggtgaacagagaatgggaggtcaatgcggacaaagtccagggtccaggcttatcagtcaaatacttggtgtcatctggttacataagactatagttattccatatttcatcatagataagataagatgcaggtctactcatgtcccaccacaccaaagcagttggaaacctcccaaggcctcctgggacattggcgatcctttattccccatttcggcaaaccccttgggcccccatggcacttagacaagaaggtgccccactgcgactgttccaaaagggaggatgagggctctgaagaagctgaagtcacagtgaaatgaatacaaaccttgggagttctagtgcagggacagccctgtgaattggatgtagtcagttaccctgaggggtttaggtggggactgtgttaaaggcaaggacataagtgtgtgtccctaagaccctggtctcaaagacagaaggaagctgaagtgagatatactgtttaggagtagcaactgcactacatgtcatgccttacgagtgtaggatgtgacaaagagggccactccacatccggaacaacctttagcaggctggctaaaggatgccttccagacacaaaagccttggaatgccaggacacagtctgtagccaaatggtacttgtggtggtcaccaccaacataaaagtgggccaactgtgccagcagaagttagccccacagaactttcccccacctaagagaaggcagtgcaccacaatgcggaattccaccactgtggaattgggggagcttagaattggattcagacacaaggggagagagtggatcacagggtggcttctctatgggatagggggtggagagtattatactctctggactcaagatgagtaaaatgacacccatcacaaaccatccagccctatgatggcacctttatggtaagtggttgcaggctccaagggggccgggtccaatgaggaagatgcccccacagctcgttctcaatggcagactatagaagagttgcaggatatcttctgggagtcgagatgaggcatgctaattatgctgagaattattgaagtcccaacaatgaattgtttactgcaaaataaaagctacagttatgtattcagtgcctacccaatggcatggtgcactgatttccacgttaagccccctgggagggcagccaacatttcatgtgccccaggtagttgctgacttaggagaaaagaagaaactgagtaagcaagggatgcaccctactgtgatgaagaacaatggcaccaaaggaagagagacagccaaggagccagtcagggtggccagacaacgaatgtgctctaactggcaacacctaccagttctctgggcccatagcggcaataggtggttatggaagggccacggaagtcagaccggttgaactagtgatacgacctgggggactgccacccagaccctgtgtagtatacacagcttccatcctagaacacatgagaatggatatcttcttaggcgtgaccctccaaacaacggccagggaattccaacggagagttagagtggtgatatgtgtgaccaagcagaaggcaaactggatgccagtagagctgccaacccatggggagtcccacagctggagcaacaccacccgccctgggaggggaagatgatccaatcatgaagattgttaaggagctagcccaggtaggcattaggaggccactgcatggttcctacaacagacctgcatggcccatgcagaggccagttgagacatggagaatgacagtagattactgggagttaaataaggtggtctcccgagtgaatgcagctgttcctaatatctcctccagtctgacgagaataggagaggtgttagccacgtagcatttccttatcagtttagtcaataccttcttcagcatttctgttgccccagagtcaagatcaatttgcattaacctaaaaagaacaatggacttttactgtcttgttccagggatatttacacagcccaaatctcacagcctagtgacctccaacctcagtcgatgggctgacccaaaggggatacatgttttccactacattggtgttatcatgataacctctgagtcttttttcagcttataaattacagcccctgtcttgctgtctcacttgctgaatagaggatgggaggttaatacagacaaaatccagggtccaggcttatcagtcaaatagttggtgtcatctggttgggtaaaactaaagtcattccatctgccatcatagataaggtgcaggcctacccacgtcccaccacaacaaagcagctgcaaactctcaaggccttctggagcatcagtgtccttttattccttttatttgacatccctgaaggaggctgctaggggagactgtgtccctcctaaattcatgtgctgaagtcccaacccttggtccttcagaatgaaatcatacttggattagtgtcctttaaagaggtgaataagttaaagtgagattcctggagtggggccctaatgcaatctgactgttgttataagaagaggaagcaggagggagggtgcacaggccccgagggacggccatgttaccacagaacagtgagaaggcgccatctgcatgccagggagcgagacctcagaggaaacccacccagctggcagcttgatcttaggctttcatcctccataagtgtgaggaaattggttttgtattgtaagccatccgatctgtggtatttcgttataaaagccctataaaatgaatacagtaggtaataggagagcttctatacattgaaaaagtcggatggccagaaaaacctagacactcctgttcagacctgagcagggtgatggacctgctttgggacaggagaggggaagagatgaacccagcacccagacccagctgagcccattcctcagcaggccgtccctgggccggagcttgcacaggtgtgaaagagcctgtcttggtcttcaggggctcatggagttggacggagaatggtgtagactcaagaacacgtcatcggtgtgcccgtgtttatctgaatgggatgtgtttctagggtgtgctcatccccaaagaagaattaatcaggtctcttgggctaaaaagaggttgtggcatttgtgtgtattaataactgtggtcggacagtaaattatgttaaactgcttatgggaaggcacaatggaaagaaacactttgttacagaaggaaaaaaaaggtgattatttaaatgaggtgcctttgaaggtcaccatgccaagaggagcccatcacatgatagtgctggctttcatgttcaggagatcaggagggtccgtccgctggcttttatgacaccctagacagagctgagagtgtaatgtatgaatggaggggaagtggagagaggggaggccaaatgtttggtgggaatggagggtcactattggagccattaggaaatacacaagcatgaattatgctggaggacagaacagtgttcctggggaatattgtgttgctttgggagctgctgaacatacaggagtttcactgttcctagttctcaaattctctagactctctggacaacccagttttaaatattgggaatataggtaagacacattcgttattaaaaattattaagagaagatgtaggaagaaatttaaagtaatccatttggttatgaaaatttagttacagcgaactgtgatgtccgtttcttacttggaataatggaatgtaagtcattagtcatctcaacggttcatttttccataaccatcaattacaaaactgctgagtaatttcctgaattgcccaccatagaaactgacctcacatttcctcaatgagaaactgccagtcccgttgatccagcctcgttcttcccatcagggattttgtatctctgtggacgtgtggcacagtgctgcatatccatcggcatatggcctcaggaaaggcgccagcctatccatgcatgatgaagcttacttaggggatgaagcccgcatgctgggtgagccagtgccaacagctgaaagaatcaactgcctggtgtatgatgcttttatgaaaacaagcccagggcctcttgcattcttctgtattagattctctggtgaagatttttattcatttctgcctgaaattgccacatataattacctggaagcattacaataaactgatttggaagttaactgacttcctggtgaggttaaaatgagtgtcaggtgcatagtgagacagaccggagacatggatgcatagcaaacttgtgctcaccatggtttctatcttagttagggaaacttctgtaccttccttagatgttcaggcactccattgaggaccctggcataacattatttattgacagaccatagctcaaagtatagaactggatactaccaaggaggatatactattactattttatctttatcttaaaatatactcttccatctgaggtgaaaattaatccagatggtagaacttattgcagttactacagcattttagcaaatcaaaagccgcagaacaaacatatggacagatggcaggtatgttttcggaatcgtaaacaagttcgtgatgactgtaaaaccaaggggtgtctcacgagggctggaaacctctcacaatgaaacaacacaatgaggatctttgaaaagtactctgacctcctggtgagctggctgatatggaggctgagctccatgtagaaagccaaaggaatttctgcaggacgtcatcatgccaagcacagccgtaacctgggtcccagcccttttcacacgctcaatggttagatcttgggagggaatcaaagaagccatagtaaaatatcaaaatttaaaccccgattttgaatttaaaaagtgttaaaatatggttgtggcctacactcagaaaatctgtgtccttcagatggtttctcagtggcaccagatggtttcaagtggctattcattaagtttctcagtgaaattaccagacatagaataaataaattgtcactgtcttaaatcaacccatgggaaaggaaaactgtgtaaatacagcagagaggaaacattgctcaagggaaaaacaatctccagaaagtattgttaaagaaacagaggccctctttccagccagcgccgagcgatgggcacctctcgggacaactggcacaagggccgcaaagctgggggcaagagaaggccctgccacaagaagcggaagtatgagttggggcgcccagctgccaacagcaagactgacccgtgccgcatccacacagtccgtgtgcgaggaggtaacaagaaatactgtgccccgaggctggacgtggggaatttctcctggggctcagaatgctgcgctggtgaaacaagggtcatcgatgttgtctacaatgcatccaataacgagctggttcgtaccaagaccgtggtgaagaattgcatcgtgcccatcgacagcacgccctaccgacagtggtacgagtcccactgtgcactgcccctgggccgcaagaagggagccaagctgactcctgaggaagaagagattttaaacaaaaaacgatctaaaaaaattcagaagaaatatgatgaaaggaagaagaatgccaaaatgagcagtctcctgggggagcagttccagcagggcaagcttcttgcgtgcatggcttcaaggccgggacagtgtggccgagcagatggctatgtgctagagggcaaagagttggagttctatcttaggaaaatcaaggcccagaaaggcaaataaatccttgttttgtcttcacccatgtaataaaggtgtttattgttttgttcccaaaaaaaaaaaagaaagaaaaagaaacagaggcatcacacttactagaaaaacatattctatttcatatattatggggatatgacgtgatgttttgacatatgcgggcattgtgaaattattaaatcaagtaaataaacatgtccatcacctcacatacttattttttatggtgtaaacgtgtaaaatctactctcttatcagttttcaagtatatagtacattagtatcatggaagtcaccatgctgtgcaatagatcttcaaacgaattccttctatctaaccaaaactctgtaccctttcaccaacgtctcagctttcacatgcccctgacgccagcccctggtaggcaccattctactctctactctgagttcaacatttttagattgcatgtgtaagtgagatcatggagtaattttttatacctggcttatttcactcaacataaagagtcaaatgctcaacatcactaatcatcagggaaatgcaaattaaaaccacgataagatatcacctcacacatgttacaatggcttagtctcagtctgtctttttgttactataaccgaataccagagactgggcaatttctaaagaaaaggaatttatgctttatggtgcttgagtcagagaagtctaatatcaaggcactggcatctcacaagggccttctcactgcctcatctcacagcagaggtgggtgagcaagagaccatttgtccacgagagaaaagagaccatcttttattagaaattcactcctataataactaacccactccattgatagtgacagtaatccattcatgaggacagagccttcatgacttgatcacataataaaggtcccacctctcaacactgttgcattaaagattatttccagatcctaaactttgggagacacatttaaaccatagcattccattcctaatatcaaaatttatgtccttatcacaatgcaaattacattcattccatcccaattgtctccaaagtcttatccagcatcagtgcaaaagtctgaagtccaaagtctcatctaaatcagatatgagtgtgactcgaggcacaatttagcctgatataaattgtttccatctgcgagcctataaagtcaaaacaagttatctactttcaaatacagtgaacaatggggcaggtatgggatagaaattcccattccaaagctcagagagaggcaaggagaaagcggtgcctagttcaaaacccaacagggaaaaaaacattaagtcttatagctggaaaatcatcctctttaacggcatcttgtgcacactggggagggggatgggcccccaaggcctccggcagtcttgcctctatatattttctgggttcagtccactcagccgctctcacaggtgggactctcaggcctctagctctcctaggctgactggaaactctttgtggtacctccaaacccacatttctgcttggcattgtgctaagggcccagtgtggtgactctgtctctgcaacaagtcactgcccgagaccttaggctgtccttaggctgcccgagaccttaggccgtccacagcattctttgaaatctaggtggagaaagccatgccctcgtggttcttgtattctgcacacctgcagaattaacaacacatggatgccatggaagttgatgacttgtaccattaaagtgatggcttgagccacacctaggtcctcctgagccacagcatgggcagccaaggagtgctgtgcctggacaccgggaacagagtcctaaagtgcctgctagaagtcaggccatagatttccttcaaatttctcccaccatataacctcgttcatggctctgaacttccaccttacagaaggacctagggatgaacacaattcagccacgttctttgccactttatggcaaggatggcctttgctccattttccgatgagctattcttctttttctcctgagacctcatcagaacggcctttattgtccacggttctactgacattctaatggtcatcacctaaataatctctaagaagtttcagaatttcctcacagctctcttcttctgagtcctcaaaagaatcacctctagtgttctattcagggcaatccagactttttatagtctgatcctccaaattattccagtctttgtgcattactacatccacttctacattttggggtatttgttatcgcaacagccccacctcttgatactgatttttcgtcttagtccactttgtggtgcaatgagtgaataccacacactggctaaagtataaggaaaagaaatttattttctcgcagctctagaggctgggaagtcaatatcaaggtgttagcatctggcaagagccttcttgctgtgatgtccatgtggaaggcaggagagcaggtgcgaaggatggaaaggggtttaaactcattttttaatgaggaacccaggcctgtagtaactaatctgctaccacaatgagtaacctactctgacgataatggcattcattgcttcatgagggcagagccctcatgacctaatcatttcttaacattcccacctctggacactatggaatttgggattaagtttccaatacacatcctttctaaacagcaggggctttttaataggttgaccacccaaggctgcaggaggctctgaagcagtggcctgaggttggctgtcctttgtgagaatggagagaagtgaactgactcatggagacacaagtagatgaggtaaaggcattcattgcttcattacatggatggtgaggtcgattgaaggcattaacggattaaagatggtggcaaaaccgtctgaggtggagaccacggggagtccatcagaaatggaggacacgtcccaataaatggtgcttcatttccctgcaaagcagaagaaagcaaagaacaaaacacaacatcatagtgtacactgagcagtggattgagagaagagtttcctaaggcataactgacagagtggagaagacacacaaatctttgcatgatgctaacatttggactgtggcttcattatttcttattaatattttactgaaatatcgctagaaggagactgaaaatgaagtgtgaaaagttaaatgggatttctgctctatgtccttttcagatgagaggaactagggaattccagggaagaaacaataatagctgctgagcaaggcttttgcagggcaggacaaggaatccccaaagagaaaacggaaacctcagcttcactttgcatctgctcctgagccaggtcctgagcgacccctgtaggtcctgagtgcccctccgtaggttctgagcatcccttggttgctgggcgccctctggtggtgtctgagcccctctggtggtttctgagccccccgccttatgtctgatcctccctggtggtgtccgagtgcccctgctagtgtctgagccccctggtggtgtctgagtccccttcttagtgtctgagccaccctattagtgtctgaggacccctgatggtgtctgagcccccagttagtgtctgagccaccctattagtgtctgagcccccctggtggtgtctgagcacaggagagctcctctgaaggaagggtctacatggggacaggcgtgcttgtctcagggaagggtccatgtggggacaggtgtgcttgtctgaaggaaggttccacatggagacaggtgtgcttgtctcagggaagggtccacatggggacaggtgagcctgtctgaggggacagaagtgcttgtctcaaggaagggtcctcatgtggacaggtgagctcttttgagggaagggttgacctggggacaggcatgcttgtctgaggtaagggtcctcctggggacaggtgtgcttctctcagggaagggtccacgtggggacagaggtgcttgtctaaggcaagaatccaagtagggacaggtgagctcgtctcagggaagggtccaggtggggacagttgtgctcatctgagagaagcgttgaagtggggacaggtgtgcttgtctcaaggaagggtccatgtggggacaggtgtgctagtatcaagaaagggtccacatagggacaggtgtgcttctctcagggaagggtgcatgtggggacaggtgtgcacatcggagagaatggtccacctggggacaggtgttcttgcctcagggaagagtccaccttctcagggaagaagtgtgctcctctgagggaagggtgcacatggggacaggtgtgcttgtctcagggaagggtccatgtgggaacaggtgagctcatctgagggaagagtccacgtggggacaggtgagctcatctgagggaagggtccacatggggacaagtgacctcgtctgagggaagggtccacgtggggacaggtgagctcgtctgaaggaagggtccacttggggaccggtgtgctcctctgagggaagggtccacgtggggacaggtgtgctcctctggagggaagggtccacgtggggacaggtgagttcatctgaaggaagggtccacatggggacagttatgctcctctgagggaagggtccatgtggggacaggtgtgcttgtctcagggaaaggtccacgtggggacaggtgtgctcaccttggggaagaggacagatgagctcatctcagggaaggggccatgtggggacaggaccaagggttgggacttcagcacaagaatttaggaggaacacagtcttccctagcagcctccttcagggatgtcaaatattttccttctgttccctgtgaaagccttaaaggggtagggaaagggcgttcaacctgcacactcgtagaggggaaaccagcttcattagtaatcgttcatctgtggtaaaaaggcaggatttgaagcgatggaagatgggagtacggggcgttggaagacaaagtgccacacagcgcagccttcgaaacacaccacggtcacgttaagtttaaatggagtgaccacattcgccaggaaagggaaatatttacacttttgaagaaacagtaatttgtgtttctgattatgatctggccttggattttccctcccctcataagcaatgacagaattggcagaaatatgtgaaacgttagttctcagacatgagacacccacagagggccccctgtgcccttccctgagagctgatcagctcctgcatctgaagaaatgaccaaagaccaggagagaaccacacagaagcatcggagggacagcacctggggctctgatggggtcaggaatagcatctgttcccaatagatggactaagtaaaaagtatcataattcacaagagttttacatagcacagaagaaaaagttaccctatatcaactgttgatcttgtgaatccaggaactctggattcaaggtggtcgggcacatcttgatttacgcatttcagggacacatgagacatcagtcaatataagtaagaaggacattagttccatccagaaaggctgagacaactcaaagcaagtcctccccacttagggcttccaggtcacaggtaggtgagagacagatggttgcattcttttgagtttctgataagtgtttgcaaaggaggccatgaggatatgcacctgtctctgtgagcagagggacaactttaaatagactgggaggcagatttgtcctgagtggtttccagcttgacggggcccaagatattttcctttcacaatctggtaacttcaaacaaaacttcaaagccacaacaaaacaacacaacaacaaaaagaataagacatgggtacttattaagagtagaaaaacattcagtccccaaggaaaatattggcagtgtctacctccacatgacaaaggagtaagcagtgtgagccacagaaaggagcactattaacccacagagcaaccgagaataacacgggtgatgcgagggcattggacgcacatcattgcattttgtagattcagaaagaaacggaaaagattgacggtggtaaaagagacagccctgcttccctctcccttttccctccccgatgaggcctcacagccatgaccctcagcctcatcccgcagtgcagcagctgccgtcctgtccaggcccaccccctgccccgccctgggactgttacctcattccctcccggagtccaggtgccccccggggtgtggtgcgggagcctggggaggccctttgttctctgtcagggtctccctgggagggacgcagccaccgcagctggttggggcctggcttcgcccaggacagtcctttcctttcccattgtctttggatgactatcgctgggctgggacatgaggcgggcagaggcgcgggtcacccttaggacccccctcttgctgctggggctctgggcgctcctggctccggtccggtgttctcaaggccgtcccttgtggcactatgcctcctccgaggtggtgattcccaggaaggagacacaccatagcaaaggccttcagtttcccggctggctgtcctacagcctgtgttttggggtcaaagacacgtcattcacatgcggaggaaacaccttctttggcctagacatctgctggtgacaactcaggatgaccaaggagtcttgcagatgggtgacccctacatccctccagactgctagtacctcggctacctggaggaggtgcctctgtccatggtcaccgtcgacacgtgctatggggacctcagaggcatcatgaggctggacgaccttgcgtacgaaatcaaacccctccaggattcccgcaggtttgaacatgttgtttttcagatagtggccgagcccaacgcaacagggcccacatttagagatgatgacaatgagacagaccccctgttctctgaagcaaatgacagcatgaatcccaggatatctaattcgctgtatagttctcatagaggcaatataaaaggccacgttcaatgttccaattcatattatcgcatatatggcaatattacaacttgttccaaagaggtggtccagatgttcagtctcattgacagcattgctcaaaatattgatctgcggtactatatttatcttttgaccatatataataatcgtgacccagcccctgtgaatgaatatcgaattcagagtgcaatgtttacctattttaaaacaactttttttgatacttttcatgttcattcatccacactacttattaaatacgtgccacatgaatctaactatgaacctgaaaggtataacttctgttcccgtatagccctgttacacattggtactccaggcagacattatttattggtagccgtcataataacccagacacagatgagaagtattggtctggagtatgatgataactactgcacatgtcagagaagggcctcctgcattatgcagcgatttcctgggatgacagatgcgttcagtaactgttcttatggacatgcacaaaattgttttatacattcaggccggtgtgtttttgaaacacttgctcctgtgtataacgaaaccatgacaacggttcgctgtggaaacctcatagtggaggggagggaggaatgtgactgtggctccttcaagcagtgttatgccagttattgctgccaaagtgactgtcacttaacaccggggagcatctgccatataggagagtgctgtacaaactgcagcttctccccaccagggactctctgcagacctatccaaaatatatgtgaccttccagagtactgtcacgggaccaccgtgacatgtcccgcaaacgtttatatgcaagatggaaccccgtgcactgaagaaggctactgctatcgtgggaactgcactgatcgcaatgtgctctgcaaggcgatctttggtgtcagtgctgaggatgctcccgaggtctgctatgacataaatcttgaaagctaccgatttggacattgtattagacaacaaacatatctcagctaccaggcttgtgcaggaatagataagttttgtggaagactgcagtgtaccaatgtgacccatcttccccggctgcaggaacgtgtttcattccatcactcagtgagaggagggtttcagtgttttggactggatgaacaccatgcaacagacacgactgatgttgggcgtgtgatagatggcactccttgtgttcatggaaacttctgtaataacacccagtgcaatgtgactatcacttcactgggctacaactgccaccctcagaagtgcggtcatagaggagtctgcaacaacagaaggaactgccattgccatataggctgggatcctccactgtgcctaagaagaggtgctggtgggagtgtcaacagcgggccacctccaaaaagaacacgttccgtcaaacaaagccagcaatcagtgatgtatctgagagtggtctttggtcgtatttacgccttcataattgcactgctctttgggacagccaaaaatgtgcgaactatcaggaccaccaccgttaaggaagggacagttactaaccctgaataacactaattcagcctcccgatccctgtaaagatacagagaatataacagcaaaatctatgaaacaggatcaggggaagggatggcaaagctcaagtccacatttcttgaagtccacaggaagcacagggtcctgtttcacatcacagggaaacgggaggcattggcttctgtcccaggttcttgtaggtcgctgatgctcactctgaaataaatcttcaaaaacacacattggtgccttccacattttcttagactcctctgggagcccaaacttggccagaacctcttgcctggagagacatgaatgagcatctggctcttgtcctgaggtctctggtcccagaattaacggaagttgccaccagctccttacagggaacattcatgacatttctccagaagagagctccagagcaatgagcttcctcattccccaggtaatctgtccttctctaaacccgaagtcagtttagggtgatccagggctactccctgttccctgtctgttcctcacgggggtgctgtgggctttgcagtgagagggacttgggttcaaatcccccaccaagcaaatccccctacctggggccgagcttcccgtatgtgggaaaatgaatccctgaggtcgattgctgcatgcaatgaaattcaactagaaaaataggtagacgtgaggggcaagctgtctgtcatttagtgtgagctctgtgagtggcagctgccccctttcttcctgcccccacatttccttgaactgaaacaggaagggaagctgagtaagtcgtgatgaggaagagaaaccaggcttgtagcagcacaggctggtccgggtggaaaacagggctaggtgtatcactgagttattgtaaaggaaaatggaagttaaatgtataaataactgaatgagataacattttattttaacttaaaattcacactaatattgacttttaaaatgcagtgtagatatgtcagagagaatttcaaaggcaaagcccaccgacggaagaaatcacccttcccataccatccacagaaaactgttggtattctagggtagtactgagatctagcatttttctgaatacatctgtggttctagatgtcctgcttccatagatattgtttagaattcccacccctttctccaaacacagcttgatatcctttctctgaacctgttagaaatttcctccattcagctgtcataaagatgcgagcaatccattcctgtgcctctgtcagtgtgttctattattttgtggctgaacgctaatggacagttaagtgtgaggtcagtgaatacagtgccctccctctatgtgtccttcgggtgtgaggggttttgctgatagagcagcaggccccatcccaccctttatgcatctccgccccccacctcacgctccagctgacctctcccctgtggcctggggcgttccccagggggaatgacctctcctctctccagggcccacccactcagtgcccgtgcaagaccaccacgcttggcacggccccacctcgtgtcagggcctgtgtcccctgccccaccccctaaacagatgggaaccactgggactctgctcagggcagggggcggaggtatgtgtgaaaggaaggcaaatgtgcactctgttggagaaatattataggtagtttgagcaaaaaatctaatgccatgggaacttttagaatgatacgtattttaacaaagaacatgaccaatagagtttgtattgaagccaggaaaacactatttagagcaacagcaatatcaaaaacacaagccaacagttcaccaagaaaaaccaccattaaccccatggaaatggtcttccaagagcatcggcacttaaatcctggaaatctgcctgcctcagcacctgttgtcctgacctgccctcctgtgtgtcctaatcactcccaaacacggggcctgcactgtgggagattcacactgtgccaggtggagggagcaggacaactgctaacaggttgttggtgtggatgccgaggccacccaagcaggtgtaaactcccacctgtggggcagggaagagtgcacgggagacatgtcccgggcatagggtgagggagagctgtgggggctctgggttctgaagtgggttctgaagagggttctggcctggcagggataagaccaaccagcatgtgaggccaggctggagtctggacctctgaagctgcaagggtcatgggctgcttggccccaggggctgtcctggttctctatggagtactttcaaacattctttcttcttccaatccccctccttctctcccaaagcctgcatctcccaaatcctctttgtcggatcctcggcttcactctgcatccgtcctgagcatcgatcttccaattccatcctcttctcttctgctatgtctaagctgctgtgaagccacctgctgtaatttactgctttatatttaatattgtaccgtacatctgttctgtttccctcatcataaatgcttcatttcatgctcagcatctgagaacacaaggccttgtcagctgtcacctccttccgttctctgtttccttcctcctatccccatattgctcatcatgtccagtctcctgccatcctgaatgcttctgatggaaggtctgagatgtctcatgagcactgtgaagattctttgtaatgtgagcttgttccaggcaggaattctccttcacccagccctggaagccaagtataggcagatggccatgctcaatcaaagactgagctaacttaacagtggctttggttttaaggtttctccaatccccagggcacaggatttcagggaattcaggtgagagtctgggtgttacccttcaggaggctgtaaactccatttcacctagtctacaccacagactatggaaactatatatatatatagttctgtccctctagagaaacctaatatgtatatatacaatatataatacgtattatatattatatataatacgtattatatattatatatattatatatatattagagtttattgaggagtattaaactcacaatcacaaggtcccacagtaggccatctgcaagctgaggagcaaggaagccagtccgagtcccaaagctgaagaatttgaagtctgatgttcgacggcaggaagcatccagcacaggagaaagatgtaggctgggaggctaagccagtctagtcttttcacgtttttctgcctgctttatatcctggccacactggcagctgattagatggtgcccacctagattaagggtgggtctgcctttcccagtttactggctcaaatgttaatctcctttggcaacaccctcacagacacacccaggatcaatactttgcatgcttcaatccaatcaagttgacactcagtatcaaccatcacaagtccaccccttgtcaacttgaacccatacaaatctcctgagatcatacataatcttcaaataaagacaataataaggtcataattacacctaatgtaatacaactatcttttgtacaaccagaaatgcaccaatccccaacccaaatgctattatgtaaagttaagaacacttaaatgctgatatgaagtcaataaattttatgtcacatgataaaggaaaaaagaaatgaaggaattttcttagtacaagtgtgtacatgcacaaacatgtttttaacaaaagaagaaggaaatactgatgacaattacagtcctcatttctgcaactgatcacgtggttgtagctggtattgatgactaccttcttctactacccattctgtattccctttgccttcagcaagcatcacagcaggtagagttttttctcctagtggagtgatgcaaaccttcattcctgaagggtctgggccatttgtagtcctgcctggattgggctgttgtagtttcccgttgaccttaatgacagggcatggtaatgttaagagacgccctaatggatctcctgtattccatacatattcttccttacctccattgtggagtaatagactgattgcatcttgatagtccaggtcaatcagcccagccaacactgtaactcccctcttagcctgtggacttaaaggtaggaggggcccaaagtggccaggtggaaatctttacttccagtttaatggaattgttgttgtttctcctgatggcagcattattcccactggaactaagacctctaggccaacagaatgtaatgtcatgggaccaggaagcaaaaattttgctagtggatcactaggggtgatggtgaatggtgccatttccacttccaccccttgattcctggatccatgaattatggctatgggagaaagagtaccatatattggatgctgatttggagcatacatggccttttggagagctttgccccagccctgcaaagtattggagcctagttgacattgtaattgtgactttgaaaggccattccattcttctatcaatccagctgcttcaggatgatggggaaaatggtaagacaagtgaatcccatgagcatgagcccactgccacacttctttagccgtaaagggagtgccttggtcagaggcaatgctatgtggaatactgtgacagtggataaggcattccatgactccacagatggtagtcttggcagaagcattgcatgcatatctgcagtaagtgtctatttcagtgaggacaaacctctgccctttccaggatggaagaggtccaatataatccaacctgccatcaggtagctcactgatcaccctgaggaatggtgtcatttgggtagagacccagagccaaaccagatcacgccacccaacccctcccaaatctcatgtcctctttgcatttcaaaaccaatcatgccttcccaacagtcccccaacatcttaactcatttcagtattaactcaaaagtccaaatccaaagtcacattggagacaaggcaagtccctttcatctatgaacctgtaaaatgaaaaacaagtcagttacttccaagacaaaatgggggtacaggcattagatacatgctcccatttcagttgggagaaatgagccagaataaaggggcttcaggtcacatgcaagcccaaactccagtggggcagtcattaaatcttaaagcttcaaaataatctcctttgactccattcctcacattcagggcatgcttatgcaaagtgggggctcctacaaccttgggaagctctcaccctgtggctttgcagctctgaccccatggctgctctcatgggctttgcagagttcagccctcctggctgctctcattgagtgcatgcagcttttccaggtgcacagtgcaagccgttaatggatctaccattctggggtctgaaagatggtggccctcttctcacagccccattagtcactgtctccagtggggactctgtgtgggggctccaaccccacatttcccttctgcactgccctagcagaggctctccatgaaggctttgcccctggcgcagacttctggctggacatccagtcatttctataaatcctctgagatctgggtggaggatcacaaagctgaactcttctcttccgcacatccctaggcccaacatcatgtagaagccaccaatgattggggctttctgaagcaatggcctgagctgtacattggacttttttagccacagctagacctggagcagctgggacacagggcaccaagtcccaaggctccaaagagaagctgggccctggacccagcccatgaaaacatttttccctgataggcctccaggcctgtgattggaagggctgctgcaaagatctccgacatgccctggaaacattttccccattgtcttgattattaatattcatctcttcattacttatgcaaatttctgcagccaacttgaatttctccctagcaaatgtgtttttctttactaccacatggccaggctgcaaattttccaaacttttatgctctgtttcccttttaaaaataagttcctatttcagatcatctctctcaagggcaaagttccacagatttctagggcagggacaaaattccatcaagcttggttttatacattttagagaggcatgagacatcaatcaaatacatttaagagacacattggtttggtccagaaaggtggaacaactcaaagctagggcttccaggctataggtgaatttaaatattttctggttgacaattggttgagtttgtctaaagacctgggatagatagaaaggtaatgttcaggttaagataaagattgtagagtccaaagttcttttgaagtcttatagtggctgcccttagagataataggtgacaaatgtttcctattcaaatcttagttgaactctttaggattgggaggttctagaagaaaaagatctagctatgttaatagagattctttacagatgcaaattttcccccacaaagaacagctttgcagggccctttctttctttctttctttctttctttctttctttctttctttctttctttctttctttcttttttagatggagttttgctcttgttgcccaggctagagtataatggcacgatcttgtctcaccacaacctccacctcctgggttcaagtaattctcctgcctcagtctcccgagtagctatgattacaggcatgcaccaccacacccggctaattctgtatttttagtagacacagggtttctccatgttggtgaggctggtctcgaactcccaacctcaggtgatccgcccacctcagcctcccaaagtgctgggattacaggcatgagccaccatgcccggcctgcagggccatctcagagtatggcaaagaaacatgttttggggtaaaatattttgattttcttatttgtctcataatgttatgccagagtcagtttggaaagtaaatcatgatatataggtttaaataaaacccatctgatgagaatttatgatttgtagagcatgcctccccagactctttagataggaatttgggcaagatgaaaaaaaaatcagagtttagtcctcactacctaagaccagctcagcttggacttcactgttcatgtcactatcagcattttagtcaaaaccactcaataagtctctaggaagttccaaactttcccacatcttcccttctcctttcaagttctccaaactgttccaaccgctgccaggaggtacccagttccaaagttgcttccagattttgagttatctttatagcagttccccactcctggtaccaatttactatattagtctgtttccacagtgctataaagaactgcccgaaagtggttaatttgtaaagaaaagaggtttaattgactcacagtgctgtgtggttagggtcggaggctcaggaaacttgcaatcatggtggaagtggaagcaggcatgtgacacatggcagcaggtgagagagagaaagagagagagagggaatgaaggaggaaccaccatacatggataaaaccatcagatctcatgagaactcactcactatcaggagaacatgaggacagcatgggggaaaccacccctatgacccagtcacctcccaccaggtccaccccttgacacataaggattactatttgagatgagatttgtttaatgacacagagccaaaccacatcagcatgtgacaaaggtctaatatcaagaatctatgagggggcagttccaaaatggctgaataggaacagctccagtctacagctcccagcatgagctacacagaagacaggtgatttctgcatttccaactgaggtactgggttcatctcacgggggcttgttggacagtgggggcaggacagtgggtgcagcccaccaagagtgagctgaagcagggcgaggcattgcctaacccaggaagtgcaaggggtcagggaattcccgttcctagccaagggaagcggtgatggacggcacctggaaaatccggtcactcccaccctaatactgcacttttccaacggtcttagcaaatggcacaccaggagattatatcctatgcctggcttggaggttcccatgcccacggaacctcgcttattgctagcacagcagtctgagatcaaactgcaaggtggcagtgaggctgggggaggggtgcccacaattgctgaggcttgagtaagtaaacaaagtggctgggaagctcaaactgggtggagtccactgcagctcaaggagacctgtctgcctctgtagactccacctctgggggcagggcatagctgaacaaaaggcagcagaaacctctgcagacttaaatgtccctgtctgacagctttgaagagagtagtgtttctcccacatggactttgagatctgagaatggacagactgcctcctcaagtgggtccctgacccccgagtagcctaactgggaggcaccctccagtaggggcagactgacaccttacacggctgggtgcccctctgagatgaagcttccagaggaattatcaggcagcaacatttgctgttcagcaatattcgctgttctgcagcctctgctgctgatacccaggaaaatagggtctgcagtagacctccagcaaactccaacagacctgcagctgagggtcctgactgtcagaaggaaaactaacaaacagaaaggacatccacatgaaaaccccatctgtacatcaccattatcaaagacaaaaggtagataaaaccacaaagatggggaaaaaacagggcagaaaagctgaaaattctaaaaatcaaagtgcctctccccctccaaaggaatgcagctcctcgccagcaatggaacaaagctggatggagaatgactttgatgagttgagagaaggtttcagatgatcaaacttctccgagctaaaggaggaagttggaacccattgcaaagaagctaaaaaccttgaaaaaagatcagatgagtagctaactagaataatcagtgtagagaagtccttaaatgacctgatggagctgaaaaccatggtatgagaactacgtgatgaatgcacaagcttcagtagccgattcgatcaactggaagaaagggtatcagtgattgaagatcaaatgaaagaaatgaagggagaagagaagtttagaggaaaaaaaagtaaaaagaaagaaacaaaccctccaagaaatatcagactatgtgaaaagaccaaatctatgtctgattggtgcacctgaaagtgacagggagaatggaaccaagttggaaaacaccctgcagtatattatccagcagaacttccccaacctagcaagacaggccaacattcaaattcaggaaatacagagaaccccacaaagatactcctcgagaagagcaactccaagacacataattgttagattcaccaaagttgaaatgaaggaaaaaatattaagggcagccagagagaaaggtcgggttaccctcaaagggaagcccatcagactaacagctgatctctcagcagaaactctacaagccagaagagagtgggggccaatattcaacattcttaaagaaaagaaatttcaacccagaatttcatatccatccaaactaagcttcataagtgaaggagaaataaaatcctttacagacaaacaaatgctgatagattttgtcatcaccaggcctgccctacaggagctcctgaaggaagcactaaacatggaaaggaacaactggtaccagccactgcaaaaacatgccaaatcataaagaccaccaaagcgaggaagaaactgcatcaactaacgagccaaataaccagctaacatcataatgacaggatcaaattcacacataacaatattaacctttaatgtaaatgggctaaatgctccaattaaaagacacagactggcaaattggataaagagtcaagacccatcagtgtgctgtattcaggagacccatctcacatgcagagacacacataggctcaaaataaaggcatggaggaagatctaccaagcaactggaaaacaaaaaaaggcaggagttgcaatcctagtctctgataaaagagactttaaaccaacaaagatcaaaagagacgaagaagaccattacataatggtaaagggatcaattcaacaagaagagctaactatcctaaatatatatgcatccaatacaggagcacccagattcataaagcaagtccttggagacctacaaagagacttagattcccacacaataataatgggagactttaacaccccactgtcaacattagacagatcaacgagacagaaagttaataaggatatccagcaactgaactcggctctgcaccaagcagacctaatagacatctacagaactctccaccccaaatcaacagaatatacattcttttcagcaccacaccacacctattccaaaattgaccacatagatggaagtaaagcactcctcagcaaatgtaaaagaacagaaattataacaaactgtctctcagagcacagtgcaatcaaactagaactcaggattaagaaactcactcaaaaccactcaactacatggaaactgaacaacctgctcctgaatgactactgggtacataatgaaacgaaggcagaaataaagatgttctttgaaaccagtgagaacaaagacacaacataccagaatctctgggacacattcaaagcagagtgtagagggaaatttatagcactaaatgcccacaagagaaagcaggaaaaatctaaaattgacaccctaacatcacaattaaaagagctagagaagcaagtgcaaacacattcaaaagccagcagaaggcaagacataactaagatcagagcagaactgaaggaaacagagacacaaaaaaacccttcaaaaaatcaatgaatccaggagctggttttttgaaaagatcaacaaaattgatagaccactagcaagactaataaagaagaaaagagagaagaatcaaatagatgcaataaaaaatgataaaggggatatcaccaccgatcccacagaaatacaaactaccatcagagaatactataaacacctctacggaaataaactagaaaatctagaagaaatggataaatttctcgacacatacaccatcccaagactaaaccaggaagaagttgaatctctgaatagaccaataacaggctctgaaattgaggcaataattaatagcttaacaaccaaaaaaagtccaggaacagatggattcacagccgaattctaccagagctacaaggaggagctggtaccattccttctgaaactattccaatctatagaaaaagagggaatcctccctaactcattttatgaggccagcatcatcctaataccaaagcctggcagagacacaacaaaaaaaaagagaattttaggccaataaccctgatgaacatcaatgcaaaaatcctcaataaaatactggcaaaccgaatccagcagcacatcaaaaagcttatccaccatgatcaagtgggcttcatccctgggatgcaagtctggttcaacatacgcaaatcaataaacgtaatccagcatataaacagaaccaacgacaaaaaacacatgattatctcaatagatgcagaaaaggcctttgacaaaattcaacaacacttcatgctaaaaactctcaataaattagatattgatgggacgtatctcaaaataataagagctatctatgacaaacccacagccaatatcatactgaatgggcaaaaactacaagcattccctttgaaagctggcacaagacagagacaccctctctcaccactcctattcaacatagtgttggaagttctggccagggcaatcaggcaggagaaggaaataaagggtattcaattaggaaaagaggaagtcaaattgtcgctgtttgcagatgacatgattgtatatctagaaaaccccatcgtctcagcccaaaatctccttaagctgataagcaacttcagcaaagtctcaagatacaaaatcaatgtgcaaaaatcacacgcatttctataacccaataacagacaaacagagagccaaatcatgagtgaactcccattcacaattgcttcaaagagaataaaataccttggaatccaacttacaagggacgtgaaggacctcttcaaggagaactacaaaccactgctcaatgaaataaaagaggatacaaacaaatggaaaaacattccatgctcatgggtaggaaggatcaatatcctgaaaatggccatactgcccaaggtaatttatagattcaatgacatccccatcaagctaccaatgactttcttcacagaattgggaaaaactgctttaaagttcatatggaaccaaaaaagagcctgcaatgtcaagtcaatcctaagccaaaagaacaaagctggaggcatcacgctacctgacttcaaactatactacgaggttacagtaaccaaaacagcatggtactggtaccaaaacagagatacagaccaatggaacagaacagagccctcagaaataatgccgcatatctacaactatctgatttttggcaaacctgacaaaaacaagaaatgggaaaacgattccctatttaataaatggtgctgggaaaactggctagccatatgtagaaagctgaaactggatcccttccttacacattatacaaaaattaattcaagaggattaaagacttaaatgttagacctaaaaccataaaaaccctagaagaaaacctaggcaataccattcaggacataggcatgggcaaggacttcatgtctaaaacaccaaaagcaatgacaacaaaagccaaaattgacaaatgggatctaattaaactaaagagcttctgcacagcaaaagaaactaccatcagagtaaacaggcaacctacagaatgggagaaaatttttgcaatctacttatctgacaaagggctaatatccagaatctacaatgaactcaaacaaatttacaagaaaaacaaacaaccccatcaaaaagtgggcaaaggatatgaatagacacttctcaaaagaagacatttatggagccaaaagacacatgaaaaaatgctcatcatcactagccatcagagaaatgcaaatcaaaaccacaatgagataccatctcacaccagttagaacggcgatcattaaaaagtcaggaaacaacaggtgctggagaggatgtggagaaataggaacacttttacactgttggtgggactgtaaactagttcaaccattgtggaagtcagtgtggcgattcctcagggatctagaactagaaataccatttgacccagccatcccattactgggtatatacccaaaggattataaaacatgctgctataaagacacatgcacacgtatgtttattgcggcactattcacaatagcaaagacttggaaccaacccatatgtccaacaatgatagactggattaagaaaatgtggcacatatacaccatggaatactctgcagccataaaaaaggatgagttcatgtcctttgtagggacatggatgaagctggaaaccatcattctcagcaaactatcacaaggacaaaaagacaaacactgcatgttctcattcataggtgggaattgaacaatgagaacacttggacacaggaaggggaacatcacacaccagggcctgttgtggggtggggggagtggggagggatagcattaggagatatacctaatgttaattgatgagtttatgggtgcagcacaccaacatggcacatatatacatatgtaacaaacctgcacgttgtgcacatgtaccctaaaacttaaagtataataaaaaaatttttaaaaaaagaaacacctgcttttttctgttttccatttgcttagtagatttttctccatccttttactttgagcctggggatgtcattgcatgtgagatgggtctcttgaagacagcatacatttgggtcttgcttctttctccaacttggcaattctctgccctttaattggggcatttagcccatttacattcaaggttaatattgatatgtgcatatttcatcctgttatcatgttgttagctgctcaatatgcagatttgattgtatagttgatttatagtggcaatcgttatgtacttaagtgtgtttttgtggtggccagtaacgttcttccattatcatatttagcaatcccttaagggcctcttgtaaggcaatctagtggtgatgaatacccttagcatttgcttgtctgaaaaggatcttatttctccttcacttgtgaagcttcatttggctagatatgaaattcttgcttggaatttcttttctttaagaatgctgaatataggcccccaatctcttctggattgtacagtttctgctgaaacctccattgttagcctcattgggttccctttgtatgtgacctgaaccttctttctagctgcctctaatattttttttcctttcaacctttaagagtctgatgtctgatggctatatgtcttagggatggttgtcatgtataatatcatgcagaggttatttgcatttcttgaatttgaatgttggcctctctggtgaggttggagaaattttcatggaggatagcctgaaatgtttttcaagtttctttttttctctttctcttcttaagggataccaatgtgtcatagatctggtctttttacataattgcacatttctctgaggttttatgccttcttttttattctttgttctttatttttgtctgactgagttaattcagagaatcagtttttaagctctgtgattctttcctcagcttggtctattctgctgttaatacttgtaattgtattctgaaattcttgaagtgagttttttagctctatcaaatcagtttggttctttcttaaaatggccatttcatctttcagcttctgtatcattttactttatttcttagctcccttggattgggtttcaacattctcctgaatctcagtgatcttctttcctgtgcatattctgaattctatgtctgtcatttcagccatttcagtcaggttaagaaccattgctgggaaaccagtgtgattatttggaggtaagaagacactctggattttagagttgcagagtttcttgcattaattctttctcatctttgtgggctgtttctttaatctttgaagtggctgtcctttggatgtttttgtcttttttgttgttttttggtgtgtgtttttgtttgtttgttcatttgtttgttttttgctcttatcttctttgatactcttgcaggtttgattgtggtataaagtggattcagttagctgtgtttcttgaaaatcttagagggtccaggctcacctcagcactcttgtggtgtgttctctgctctgggactgggcccctggctttattctctggccccttgagtttagaaacttgctgcattggaggggctgaggtgttcccagtccattggccacaacactatagtagggggtgccggccaaagcacttcattagagtggtggcagtgggatccattcttactcatgggtgccagcagttgtggagtcatggcagggtgcacatgcatctgctggggtgggggtactggcaggagcagagtggcagcatccctacataggttcctgctggcagtcacagcgcagtgaggtgcccgtgtgttggcagggacagggtggtggggcacacatgcacatgcttgctggtggtagagggagttgtgatctgctgtgcactcatgccagcaaagcagttgggaggtactatgggtggactggtgcacatcagcagaggctggcctgctggaggtctccaatggttaggcatggtctgctggcaaaggagctatgatgagggcccccaggaaacaccctggttgggcttccaaggctgtactgcaagcaggcacagccagcctggggccccaggagaggccagaaggcaaggaaattctcatttcagatgggccctgtcccatggacaagaccaccctgctttattcaggtcccatagtcactctaaggttaaaatctcctagaggaggttggtgagccttgggggatgggtgtcccctggctgtgctccactacagccattctcatgtcaaacactctgggctttacacagactggagtcctgcccctggcatctctctaagcagctgtcccttccagcacaagtgtccatgggggtcatggggtctcctgctgctaggattctggaggcccatggcaacagcaggccactcctcacctgttcaactcaacctttccccaggagttgctgggagccaggaatgagtcctggtgcttggcatccccatgcagggttcccatcttcctccaccttcagctcagcatctgtgtcctcccccgtctactctcaatccactctcaatgcctccccttcaaagatctgcttggaaagcacccgtcttcctgatgtctcactccctccatggcagatattcctcctggctgcatctagtcagccatcttgactcgcctccaaagtctttttaattaccacttcggttaaattagtaactatcattttacaatggcctgtgattctgttttgatcaaatattttgagccttttagcatctataacaaatgttctcaaaaatcaaaatcctaaatcaagtctctgccttagtcttatttctggggcttattaaggctataaaaattaatcaccataaggttgtacaagctttttacagcttccagtcaggctatgaactccagtatcaccacctccagcctgataattacatatattggaagaaaatcagttaaaggactccctctagacccttgaaagggtgtgagagacaacatggtttcgcctgccttcatgtgtcccagtccatccctgtggctgcctctgtccacctcagcttgcccactgtctttccttcccaactgtctgccctgctgacttctggcctcagtgacagatgcaaagacaaggcgacagccccacatagaccgtttaaccagtcccacatttgcataagctaaatggtcatgtcacagtctgttgcccaggctggtctcaaactcctgggctcaagtgatccacccaccttgacccccaaggtgctgggattacaggcttgagccacagtgcccagccaagaacccgtttttgagtgggcaccttggcacacacctgtaaacgcaacactttgggaggccaaggtgggagtgtggcttgaggccaggaggttgaggttgcagtgagctatgatggcaccacctcactccagcgtgggtggcagagtgagatcctttagaaaaaaaaaaaaaaaaaacttgttttctctgcagccgggctccgtgaccaaacacaaacacaaacttcccctccagagggtccaggaggggctgggctgcaggaggtgcttagggcctcttagggaatggtaagtgaccacccaacgcaggcactcagccccaggggcatatgcagagagagggtccaggaggagctgggctgcaggaggtgcttagggcctcttagggaatggtaagtgaccacccaacgcaggcactcagccccaggggcatatgcagagagagggtccaggaggagctgggctgcaggaggtgattagggcctcttagggaatggtaagtgaccatccaacgcaggcactcagccccaggggcatatgcagagagaggctgggaggacactttcagtgactggggttacaaaccccaaccataagacattgctggctctgtgagccgccacctccagaaatctcccacttagttcttagcacttatccactcttcccttttcctactctcaattcctggaggatgccctcctttctcaggctcagaccaacctaccagctccactctagacctgaacacatgactcctccctctgtctccacctggaaatctcatcagtgcctcacatttacactcctgaaaatcaggtcctgcctacccaccctcttgctccacctgattcctgccctgtttcagccagagaccttgcagtctcctttaactctcaaacccacccatgtcgtgtgagcatactgactgtgttctatgcaagaaagagcagtttcttggtggtcctgcggttttattagtccagaggcaaagcgttggcagagctggtttcttctgaaccctgggagggagattctgttttcatgccttttccagattctagaacccatattccttgctctgtgtccccttcttccatcttcaaaggccatcctctcatctctgtgtccatcatcacatcacccttcccctgactctggttctcctgcttccacttataagcacccttgtgattacatcatacccacccagacaatgcagggccatattctcccctctcgagattaatttaatcacatctacaaagttcctcgtgccatatgaggtcactaaaccacatgttctgggggtttgaatgtaaacatttgggggatgcattattcagccacccacaagcactgctccccactggccacacactatgcacagccgagatcatgcaagtgaggcacgttcatcaacagcagcttcagcaggaaactatatgctccactttcctgccatttgtatctggatttttttttcgctatcattgtagaaagagtggtattgtaaaattaaagatggattattttctttctagaacactttggcaatctatccaacattatttatccccttctgagtgtcaagtgtgaggtcattctttcattgagagctcaatgcctacaattatgataatgcatattgggtactttcacacatcagaaagttcttctttcttaaaatctgttcttgaattattcattcttctctagctttttgttgatctattttataattttagaaaaatcagaaagtaacttgaagtatctgtcatctctacaggtttacctccctctttgtggccttcagaatgtcatgacacgcttttcccttgctcatcacatggtttctatgtatgagacctcatcacaggagctgtggtcccccgggagcaggcatctgtggatggtgccttgctcctggctgctgggacctgtgtgctgccagtggcactccacgacagtgatttcccagctcagttttgcagctccagatggtgggtgagacactaggaccactttgtgaacagcgagggcttggggtttgcttttctaccatgtccagggctgctgttcatgagggaatgtttctaacctgacatcatggctgaagccaacttagaacctctctagccgtatggggagtaggtgagtgatacagatgttaattagctcagtggagccactcccctatgtagacatgttacaaaacattatgctgtacagaataaatataggtcatttttatgtgtcaatcaaaagagaaactaattatttaaaaaaaaaaaaaaaacctctctactcaagccgaaacctcagctccagtcccacaagtcacacaaggctgctcccgtcctgtgtatgttaaacctacctcagaaatgcaagggggcattcaggtttcattctcaattcaaatgccctttttaattttgtctattcctagcacctggcaacttccagctctttttttcggggctcattcattatttaaagcacgtataatttttcacccacattctaacacatgtagtactgtagagaatccttccctaggaggatctacagcattagaaaagaattaagaactccaatatttacaagaaggaaaaagcaaaaagagatcaaaaaatgggcaacttctagaaatagaaaaccctcatgagtatgatgataaatcgctggcacacatgtgaatagttacttgatgcttatagtgatgtctgggaaaataacatgaaatacttataatctgtttctcacacatgtaattcaaaagaatagagagaagatgatttgaaatattcttaagtttgtaggaaaaaagctacttccatatgcataattgcatgtattttgatactgccattattaagaactatctaagagggtccattaaaaataaaatttcttggctgggcacagtggctcatgcctgtatcccagcactttggaaggccgaggcaggtggctcacctgaggtcagaagttcaaaaccagcctggccaacatggtgaaacgctgtatctaccaaaaatacaaaaattagctgggcatggtggcatgcacctgtagtctgagctacttggggggctgaggcaggataatcgtttgaacccaagaggtgtaggttgcagtgagctaagatcataccaccgcactccagcctgacagacaaagcaagactctgtctcaaaaatattaaaataaaatttctcattcctattacagagtaatttaattcattaatgccctgccctgttacaaaactcatttgtaaaatactaattgtaattgtgaaaaaatggcaattgatactaattttaaattctaaaaacagggcacccatattaaagattattctgcagtaagagaattagctataacattttgtaataaggtggagaaaacattctccaacttacaatggttggtgagaagaaagtttccagcacggtagatggaccctaagagcccttgttgaaataataagacaaaaagatatacagagagatgagccagatgaagggagacagagagagagagagagagagagagagaggcacagaaatgagagatacaaagtgaaagagggcaacctgtggggtcatcagatatttgttttctgttttgtttattctaacataaaggcagtggtgggtcatcgatgtatttagagtttgcacaatcactgtggaacacagacagacacaggggaagaggagaaacacagggcggtggcttgcccttggactgttcttagttcctcaaaacgtaacagctttgcccaacctaagggaactttcagcagctgctcttctgccataggcctctttcctgccttgttttcatgtggctgactgtttctgttcctgcaggtcttagctcatcagacaggcatttattacctctgtgtcaacagtgggagcttccattactctctagcatgacactccccttcctcttttaggaaatttaacatggaagtgagtttgccatcggccttctccccacagtgttaacagtggtgaggaagccagcctgttccaccttgcccctcccatgattccaacactgagttcagacttgtcacatggaacttatctttgcatgtttgtggcacagacagatggacccaaccatggattagtggatggatggatggatggatggatggatggatggatggatggatggatagatggatggatggatggctgagtaggtgtgtggatggaagagtgaaaagatagatggatgcatgtatgggtggatgggtaggttgatggatgcatggatgggtggatggatgggtgagtggatgaatgggtgggtaggtgggtggctacatgcatggatgagtacttggatagataagtgagtggatggatggatggatggatgaatgggtatgtgaagggatggatgtattagagtgggtagttaggcaggcatgagctgatagtcaagtgattgttaaactgcctctctaaaataataattggtctcggctggacgcggtggctcatgtctgtaatcccaacactttgggaggctgaggtgggcggatcacaaggtcaagagattgagaccatcctgaccaacatggtgaaaccctgtctttactaaaaatacaaaaattagctgggcgtggtggcgtgcatctatagttccagctactcgggaggctgaggcaggagaattgcttgaacctgggaggaagaggctgcagtgagctgagattgtgccactgcactccagcctggtgacagagcaaagctctgtctcaaataataataataataataaataataattgatctcagccagcgccaagaaaaggcagtctcccaatagatagaaaacacccgaaactggtcatcagcagcttcctgataagatctcaggcattgggtgagtgggctcaagcatatgcactaagaggcaaagtggcagagtttaactggcacataatcttcctctaggaacactctaatagtaagagaaggacacctcaaatgagcatgtgcacatttcattaaacccactgtgtatgcagcccctcccaagtgctggcaggccactgtacatgtgggcagcccactccaagggaagaatcaagggagaagaaatacaaatcccagaaccatgtcaatgtataaaaccccaagtcaagggccggacagagcacttagatctctcaagtcgcccacttagccctcttccaagtgtactttacttcctttagttcccactttaaaactttaataaacatttactcctgctctaaaacttgcttgggtctctcactcttctgtatgccccttggccaaattctttcctccaaggaggcgagaatcaagttgctgcagacctgtatggattcgctcctgctaacagatagctggatgggtggacagatgcatgaattagtggatggacgtttggatgtgtgggtgggtgggtggattgtgggatggctggatgaatgcatggctggatgggtggacagatgcatgaattagtggatggatgtttggatgtgtgagtgggtgggtggattgtgggatggctggatgaatgcatggctggatgggtggacagatgcatgaattcgtggatggacgtttggatgtgtgggtgggtgggtggattgtgggatggctggatgaatgcatggctggatgggtggacagatgcatgaattcgtggatggacgtttggatgtgtgggtgggtgggtggattgtgggatggctggatgaatgcatggctggatgggtggacagatgcatgaattcgtggatggacgtttggatgtgtgggtgggtgggtggattgtgggatggctggatgaatgcatggctgggtgggtggatggatgcatggataagtggtggacggatggacgggtgagtggatgggtggatgtgtgtgtggatgggtggataggaaagccctctaattgattacagggctcagtgtgtgcttcaacatcatgatggcatcatcacattggtccctgtatgaagcagtgggggaggagagtgtaccaggggagcaggaatgacttttctccagaatcgacctctcccaccctgcagcctgggctgtgcaggccacattggagaaggtgcggtcgactactcctaaatgttgttgtgtccaatggcttgttgacgttgatgtaggaatgagcctacatctccaccatagatggaactgtttgggtccccaaagcagaaagcctcttctgttgcaggtgctgaagtttccatcttcttctgcttatacggaagctcacgcatcccttggatggcaggcgtcaggttcctgtgcgcactgagttccccccttacatgctttggacagaagtgtgagacacacaagattgctgcaggaagtccacctgtggggatgctgcgacttctccagcaagaacacgagtctgctcattgaccatcaccacacataacaaattaagtgtcccttttttgataacacgtcattgtttcacagagtattcttttaaagtgtataagttgactgcagttattattttttacttctgttactaatttactcataattaggcacaatttacacttaagaaatttcttaatagttttttcctccttaaggtgaactacagtcagataacatacttatcaattgtctctagctcttgtcagaaaaacatatagatgtgtgtgtgcgtgtgtcttggcctttccaatgatgaattaagatgtgcattgagaaggcattcactttatttgacgttaaggaagtaccaagaagacgctctccacagaccctgggaaagccagcagctgcaccccgaggctgtgccaggcagggaacaaggaggcagcaccacctgctgggcagggaaaatgtcctcccagtccctgccgcttctctgcagaggcacaaagagctgccccttctcctgggccttctcctgggctgatgagattgctccccgatatgccaaatcagggttgtgcatctgaggctctgtctagactctcagctccttcctactcctgcaaagtgaagaaaacaatgccaaggggtcctggaggcgtctctacccctggagagttttgactctcttcaatagtctccactaccctgccctcactccatgtcctccgtttctccctaaagcggtgcccagtctgattgcactgtggcagggataacgaggggccaggacatcaggggagagaagtttctacctgagtcacagcagcggctgccctgcagactcctgaagacacaagacacatttccatcccagagacccagcgaaatgcaacctcaggctagagacagccagttattttttcttgttctgtcctggagaggccactgagaaagtcgagccccttgttgaggaaaacatgagatctctgtgtgtcgtcctctgcctgatggctgtacctccatgtgagtgtctcagagatttcagaacgggggctgtgggctgtggtgtccgcttgtgactcatctctttgcttcttgtccctgagtgtcctgcatcagatgcagctactggagtcatgcccagggctggtgaggtcctcacagacctctgggcctggacccagcagccctctgggaaggcgctggggcacctcagctccaggggcagcacacacttcagcccagcctttctgggccaactctccatctgtagagacacatccaaggcccagttatccctgcagctgagctccgtgatggccaagggcagggccgcacattcccgtgggagacagaatggggacctcagcgtgagcccagacacaaacctccctgcagggaagcacaagaccaccaggcggcgctccagaccacacagcggccccagaagcaggttttagggggcggggcagacgtgtccgcgttgagtcaggtcattggttttactttccctgagcaaacggcctctgccaaggactcactgcacctctcaccttcacagttgttttttttttttttttaatcaccctgtagagttttgctagctaatttagatattgaggagtgcttcatacttccttgggcctctgcttgcagaaacatagcaattgtaaggaggcacgtgggaaagccccggctcggtgacccgggggatgctgctgtggccctggcaagagggcgtcgggccgcagtaacaaaggtgcagacggctctcagcctgcgcccgcggagtacaacacataagggctgtaacctaacgaaaaaagaatcgcagtgcaactgtcctgcatttgagtttgtgatcagttttgccctttgtctttaacaggttctaacataaaattttgaatgttggttcaagccctgtgggtaaaatgcacttacccacattccttaaacaaatagaacactgaggtggaaatgttttgaaaaagtagttttcagacatttggaaacaagcatcacaggatcataacccctgagaaaagaaaaacaaatgaacgaatcctgctattgcctgaaagcagctgccaggacacacggaaaggcttagtgagctgagcggacagagagcagagttcaaggcagcagcagcccgaggggaggagcaccggggagcaggctgctgtgcagccaggatgggccggggtggggcggggggagaacagctggagacttgccgcagggagggggatccctcaggtttggggctgagaactgacttatgcctgacttatgcctgcatgaaaagaaactactcgatatcagggggaaatcaccagaaacctgtggacccaaaactacacagagcctacacaaggaaagcattgtttgtgttctcccagccagggtggaaagaccttgagatatgtaaagcttcaagcaatcttccgaagtaatctcgtgagtagtggtgccacattaattcaggactaaaggctgctctgaactgaacctaagaaatgcttcaagtgtagcctggagcccgggtgcagtggctcacacctgtaatcccagcactgtgggaggccgaggcaggcggatcacttgaggtcaggactttgagaccagcctggccaacatggcaaaacctgtctctactaaaaacacaaaaattagctgggcgtggtggcagatgcctgtaatcacctcccacctggacccttccttgatacatcagaattacaactagagatgagattggggtggggacacagagccaaaccgtatcacataggaacctaaaaggataataaagtaggaaaacttcccacatcagtaaccctttatccgatagtaatcccaatctgcaaagtaaaactgtgtgattttactaagataacggaatcttctctacagaaggactttccagtgcaaaagctccccaccctcaccatgaaatgcacgtgaccatttccaatttgtgtaaagtcctcagttagtactgagacttcggaaggttagaaatccctttgctcatgctgcatggtccggatgagatgtaagaatcattagctaatagacatgcaacagcttttgtgtgaaagatgttatgagacatttaaggtatttgcttgtgattactaagcattcattgtatcattggagcacatgtgcttttataccctggagaaattccagtaattgaattgctgggttgaatgggattttgatttggattaaatttaaactatagattttatttagggaaaactggcatcttaattatgttattggggggcccttgctcccagagctcccaagatggtggcaggccgcttccaaaatgaccgcaggccacttccaagatggtggcaagcctcatgttctctgacctggggttcttggcctcacggattccaaggaatggaagcttgggccatgcagtgagtgttatagctctattagaagccgtgggtcacggaagagaaccgtggaacccagtgactagtgttcagctcgattaggacgaacccaggcacttagccgtgcaggaacaatggcgagcatttggcccgatcgagagtggcaatgggcgcctcgctggatcaggagcacagcggataccctgatggatccggagggatggaagccagcggtgggtctcccacgggggcaaacagcagtggtggacggtgagcgaaagcgaagctcgagccgtaacaaacatggaccagaagagtgcagttgcaagatttagtagagtgaagacagagctcccatacaaagggaggggacccaaagagggtagctgttaccggctcgaatgcctgggtttatatcccgatcattgtccctcccgctgtgctctcaggtgatagatgattggctatttctttacctcctgcttttgcctaattagcattttagtgagctctctttactatctgattggtcgggtgtgagctgagttgcaagccccgtgtttaaaggtggaagtggtcaccttcccagctgggcttagggattcttagtcggcctaggaaatccagctagtcctgtctctcaattacactgagttttccaatccatgcatccaatatgtggtgtatctcttcatatgttcatagcctctgagcaatgttttacaattttctgtgtaaagaactccacatcgttttatgtttcttctaaggtatatcctgattgctttttatgtcttcacaagttttttcctttcaaaattaattttccaattgtttggtgctaatatgctcaaatgtccttgattttcttagtttgaacagtccgtttttgttttggggatttatttttttttcagattctttaagattttctatgtctataaccatataatctctgaacagagacagttttgctttttcctttcaacttgaggtaggttttctgggtagttcaggacgcgcaggcactgggtgggtggtgttagcagctgcacgatgccttggagaggacactctcgggggactgtggccgctgctcagctgtgaccgttcttatagcaccagcagctgcggccaccattcttatccaatttccaaagccacaccacaggccctctcaagaacgaggcgtggaggctatgccctctcctggacacatcatcattcccaagccccacgatgtgggccccatgggacgcacacctttgtctgtccagacctcagccccacctcctcatcctgcaccagaactcttcagagcccagtgcatgaaatgggctaccaaggaaatgagggtaggttcctgagaggaaactggccctgcatttgggagctaggagtctgctaattcgcctggcagccctgtgcagccctccgtggctacagtccaccccgtgcccatcagtgcctccttcctgtgcaagcctggacctcgccctgggctcaggatgggctgtagaccgagaatgcaggcgggaaagtctttgtctatcggggccatagtcaggttctacagtgagtcagggaaagacctgtggaggtgtggatgaggacaatgggtccaccatcaacaggaggacacgggttcgaccccttgcagaggcacagtcccacatcactgggaggcagccacactcactgcctcgccctctcctcacacagtgcagtttccacgttcacagccccagccagtcaccaggaatgccctgggggcggcctttccccagtgcactccgagccctcccttggctgtgcggtgagctccatgcccaggagatatccacccatagtcctccggaaagcagctgacctgccatgccctggaaccacaaatccccacagatcagccagcctgcagtgggccttggatgtggtgaggagtggtggcacccccgttcccaccccacagatgcaacgcctgtgggtgacgcatgtgagtactgaggagtagagggtagaactgtaggccccgagaaccacagaaactcgggtgttacactctggggccatgtaaggagaaagtgtcactggacagaaacaggcccctcctagacactgtgtgcgccatagtcacctgtcattagctctcactcttgcagattcatgattgaggtggttaaaaaaaaaaaagctcctactcacccatccaaccccatcctggggtgtttccaccacccttggggtttgggatgagctgcccttgcccactgtgctctgtggacctccctttagaagctcacagctccctgcactcggctccatcctgccccaccacacagaagcaaaacccctctcctttccactgcaggcttttcctggaccagaatgctgacctgctgcccttcactcccgaagtggtgggactgcctggggtggtgtgggtgttgagccttcttactctagggacctggcacctggccccaggggcacagggatggtgcatctgcctagggatgcctcctcatgccagggggtgggggttagtaccatcggccctcaggatttgttgcatgaatgagtgaatgggtgaataaatgaaggggatctgatctatgaataagggtatatagactttggttgatgtaggacgccaaatgctggaatttcagagtcatcacacccaggggccctgcctctgagctcctctttgcatccaatctgctgaagaacatggctctagggaaacccagttgtagacctgagggccccggctcttcaatgagccatctccgtcccggggccttatatcagcaagtgacgcacacaggcaaatgccagggtgtggtttcctgtttaaatgtagcctcccccgctgcagaactgcagagcctgctgaattctggctgaccagggcagtcaccagagctccagacaatgtctgtctccttcctcatcttcctgcccgtgctgggcctcccatggggtcagtgtcagggagatgccgtattcacagcagcattcacagactgaggggtgtttcactttgctgtttccttttgtctccaggtgtcctgtcacaggtacagctgcagcagtcaggtccaggactggtgaagccctcgcagaccctctcactcacctgtgccatctccggggacagtgtctctagcaacagtgctgcttggaactggatcaggcagtccccatcgagaggccttgagtggctgggaaggacatactacaggtccaagtggtataatgattatgcagtatctgtgaaaagtcgaataaccatcaacccagacacatccaagaaccagttctccctgcagctgaactctgtgactcccgaggacacggctgtgtattactgtgcaagagacacagtgaggggaagtcagtgtgagcccagacacaaacctccctgcagggatgctcaggaccccagaaggcacccagcactaccagcgcagggcccagaccaggagcaggtgtggagttaagcaaaaatggaacttcttgctgtgtcttaaactgttgttgttttttttttttttttggctcagcaacagagatcatagaaaaccctttttcatatttttgaaatctgttcttagtctaatggagattctctaatatgtgacaatgtttttctcttgctgtttttggaattctttgtctttgacttttgacaacttgacttttgacagtgtgcctcaaagaagttctattttgggttctgtgaacctcctggatctgggaagttttcagctatgatttcattaaacgtgttttctacaccatttccctactcttttggaatacccataatgcaaatatttgttcacttaattgtgtcccataaatgctggggattttcttcattcctttttactctttttttctttttattcatctgcctgaattatttcaaaagatctgtcttcaacttcagaaactcttttgcttggcctagtctaatcttgaaggtctcaattgtacttttaatttcattcattgaattcttcaactctggaatttctgttggttcttttttatgatacttatctctttgttgaattcctcattcaaatgataaattgttttcctgatttcactgaattttctatctgtacactattgtatctccctgagtttcttagagattatccttttgaattatttttctgacattctgtatatttccttatgattggggtctgctactggagaatgactgttgtctttttcaggtgtcgtgtttcctggccttttcatgttttatgtgttcctacgttgatttctacacatctggcggaccagtcatcccttgcaatttaatggagtaggttttgcaggaaaagacttcctagtacagacgggtctcagggtgtcagtgtggcggggcgtgctggctttagttctaggttgacgcagtagcgtagtctccatgtcgtttcttcagctgccgtccacattggtgacgtttgcgagtgtctcagtggcctgggctgagaggtttgtggcagtggaagtgcaacgttgctagaggtggactcaccaggctgtttctgaggtcgaggcacatgcatgcacatggtggattgaccaacttggtgccaggctcactagggttggggacatggggctgtttctcaggcccaggatgcaaacacaagtctctttggctggcctgggggtgtggcttctgagggcaatccacagggctgtttctcaggttcaggacacaagtgcatggccgctcaactggcctgggcatgtgtctcccagggccaccccatgggctctttctcagacccaggacatggccacatggcttcctcagctggcctgggtgtgtgtctgctggggggctgcaggggcacagggttatttctcaggccggggtcatgggcgcacagctgcttgctggcttataggagtgcctgccaggggtggcccatgatgctgtttctcaggcctaatttcaggtgcagagcctttgggcaggtcaacggcatacctgtggaaattggagtggatgccacagggctatttctcaggtgcctgagtgtgggcacatatccactctgccagcctggagttagtatcaggtgctcggtggctcaggggcctctcctgctcaggggagggccctcagcagcttggccaaatcaatggtggattcaccctgggcaggcctggcaggctcttcctccagctggatgtgcagcagcaggggttgggttttttgctgtgcagggccagagtcacggccaatcctcagcctaggctctgcacagccagggttgtggcattcagccacccagatatgggcatcctgaagatggagccccaatgctagaaaggggcagtggctaccagcctcagggcaggatgcactccagaggcggctccggtctcaaggtggcgctgggctgcagcagctaggctcacagtggatgaatgggggcagggagtacacaccttgtgctcctaatctgggatcattcctggcagctcccaaacttggctgagggcttgcaaaacctgtggaattctcctgttgcaagggctgtagatgtttgcagtggcagtgggtgctggcgggaaatctgcttaccttttccctacatgggaagtccctcctgtgtccagaccaatccgatctgggtggggaagacaaggctgcaaaggccaggtgcctccatgctgccctccgatcaccacgggtgcgtttccacacctccactgcactccgtcagtctcccttcaacactccagtcaaaccttagctgtttcttctttgccttattccttcctcatggggagggtgtgggtgaacaccaggcttctctaagttcttcatccatcttgctgatgtcattctccatccaggcatgggtttttaagaagtagtgaatactgaaatttcagcagaggacacctctataaaaattctgcaactggaaaacctccttaaattggctgattgtcattacaattggaggaaaactgccaataatttcaaatttagaaggctgagactctataaacaaagactaacaatatgttttctgatatttttccccaaaataatacttttccaagacgaaaatttttccagggtatataagcacatgtgctccaatgatacaacaaatacttactaatcataagcaaataccttaaatgtcttataacatctttcacacaaaagctgttgcatgtctattagctaaaaattcttatgtctcgtccagatcatgcagcatgagcaaagggatttttgaccttcaaaagtctcagtactaactgaggactttacacaaattggaaatggtcacctgcatttcatggtggtggtggggagcttttgcactggaaaatccttctgtagagaagattccattatcttggtaaaattacatagttttattttgcagattgggattaccaactgataaagggttactgatgtggaagttttcctactttattctcctattaggttcctatgtgatatggtttggctctgtgtccccaccccaatctcatctccaattgtaattcccatgtgtccagggagggtccaggtgggagtgattagatcaagggtggtttttcccaggctgttttcatgatagggtgttatcatgagatatgatggtttaaaagtggcaggttcccctgctctctctctcgcctgctgccacataagacgtgccttgctttcccttcaccttctgccatgattgtaagtttcctgaggcctccccagccatgcggaactatgagtcaattaaacctcctctctttataaattacccagtctcaggtagtatctttatagcggtgtgaaaatggactaatacactatggctttgaattaataatttaaaatttgtcagcttggcaataaaacatcctgttgacatttattttttaggtaatattttaaattggcagtttcattcatgtttttacaaattcttattttcagggtgtttaaggcctttgctttgaacttggtggttccttacactccatgctgttagtgaagagggaccaggttgggaggcattggtttgggtggtggtcaggaagggcagagtgatttgagtagggtctgagtggataatagctcatcagtttggaatttataaatgaccagggatgatttaaggagattcctgccagacacctatgccatggccatgccctatctggatctccagccgtgagatgagaacccagccatgcgggggagtctgttcgttctgctcaatgttgtaagtggcacatgctattggataatgtagaattgaatggatatcattttattattataatttacaaacttcctacaataaacttatcacctttatacatagaaacaaatataagtacattttccctcccctatgtcattttgagccctctctccaaaccatcctcccactctgcgactcactgtcctgcatttggctatgctctggcaagtcctgcttagacaagcactcaccagaccacctactcagcctcccttcagcgcccacctggcccacctgctcaaatacatgttgagtggtcacacacatggactgaacaccatctattccatgcactgccccagtgaccgcactgagcagcaagagagaaatgatcgcattagctatcaattatgccaattcaaatgctggagtctttctcagatacttttcaatgttcaagaattgttgattgtgaattctatacccaatgaaactatccttcagaaatgagcagaaaatggataccttctcaaataaacaaaaactaaaagaattcttgctacaagatgtactcttaaagactggctaaaggaagttcttcaaacagcaaggaaattgaattgatcttatgtcctgcacacttgctaaatttcctctcaattttagcagcactgtttagattccataggattttccatacaaacagtcatgtggtctatatatagagacagattttcctcttttccagtggggataaatttatgtctttttctttctgtgttacagcaggtaggacctccagtacaatgttaaacagaagtggtgaaaacagacattcttgcctgtttcctaacgttggagtttggtcttttactatggtgtcagatgttagctgtagggtttttataaatgcccttcatcacattgaggaagtttgctcctatgcctaattttctgagagtcttttaatgtgacactcatgctagaatttattaaatgctttctgtctactaagatgattatgcagttcttatattaacatgaataattacatttatttattctttaatatcaaggcaattttgcattcctgagacaaaccccatttagtcatcatgtgttgttattgttacatattgttggattcaatttcctcaaaatttgttaagaattgttacatctatgtttacaaggaagattagtctgtagggtattttttcttataataactttgcctagttttgcaatcagggtaatgctggactcacagaatgagttgggaagctatttcctcctcttcatttttctgaaagaatttgtataaaattggaattatatcttccttaaaggtttgcaagatttcataatgaagtcattggcctagagttttctttgtgggaaagtctttgtttgtttgttttgtggtttgggtttttttttaagagacacagtctcactctgttgcccaggctggaatgcagtggtgtaatcatagctcacagcagcctcaacctcctgggctcaagcaatcctcctacctcagccttcagagtagctgggactacgggcatgtaccaccacacccagctgtttgtttgtttgtttatcgctttgtcttgtttttgaggtcttattatgttgcccaggctggtcttgaactcctggcctcaagtaatcctcatgcctcagcctcccacagtgctggaattacaggcatgagccactgcacacagactgtgggaaagtttttaactaaaaattcaattttctcttccttttccagtgagctttccagtgtctttcaattaatgtatctattttatctaagttgttgaatttattgtcaaaatttttttaaacaatattcctctcttagaggttgaacatctgtagaatctgtagtgatggcacctcttaaatccctgatcttgctcatctgtgtcgtctctctttctctaatcagtatgcctaaagtttaatttcattgattttcttaaaaaactggttttggttttattgatttttttccctagttttttgtgttacatttcattgacttctgctctgatatttactatttcctttctactgcctacagtaagtttaatttgctattttcttagtttcctaaagtggaagctaagtttattgacttgaggcctttcctctgtctggatgcggatatttgctgctaaacatttccctccaacaccatgctgtgagttttagttacagcgggcttggagttggcctgagaaattctacttaaacagctgcacctatcatgtaagtgataaatgatgtacctgcctggccctcacccctggtcaaagaatgggatgtactaatgagcaatgttgctgcgtagctgtggatttcaaggtattttctgtgtggttttatcatcagcattgtttgttgatgactgcaagactgatgatttgcacctggcctcggtgagatccccgaaagaccctgcagatgggctggttacttagcagaaaatatgacaacgtggccagcaggaaacaggaaggtacaatcggctgcaggtgagctgttggaagtaagttccaattttcctattttgtatttgcattttaatagtgagactgcgcttatgttatttgtgtgaaacagctttattcatagcactgtaatttaaagagaaaacccattcatgggaacaacaaacgacctagacaccaaggtagctcatgccatccaaggctatactgtgcagtgattgggaaaatgggcactggtcccagaagtctgatcgacactctgccactggctagtcccgtgctggggggcgaggatccacactctgccactggttagtcccatgctggggacaagtatccacactctgccactggctagtcccgtgctggggggcgaggatccacactctgccactggttagtcccatgctggggacaagtatccacactctgccactggctagtcccgtgctggggggcaaggatccacactctgccactgattagtgttgtgaagatttaaataaagaacccacaccatattctttgacttgtgctttccgtatactgagagatagtaagagtacattattattatttataaagtaaactagaaagcacatgggaagacaagaagaaaacctgaataaacatgaattaccccattttcctcaggagaaaactttcacactctgaaggtacacaaattagcctacaaatttaatgtaaagcaaatagactgttgtaggtaccaattctcaatgtcacagtgttacatggaaagtaaaatacacaagaacagcccaaaagatggaaacaatggacgtggtcaaatgacatcagtacaacatccatatggtcctaagtagccatctttaaaatgggttagaaatgccttcaatcattcacacagacacatgcattgaacaaactctaagaagtgttcttacacgggaaaagcaagttacagatgcatgggcatgatatggatgtagatgtgtgtatgtgcatcccactcatacacaaaatacccagcatcgcccacatgcctgctgtgtgcgtaagtgtgagcgagtgcacagacaacagcgtgcagaaattcaaaccaagctgtgggtacttgttaccactgggaagggagtcggtcacagagggaaagagaaacaggacatcagcctttgacttcagaactgttcctgccttttcacatcctgtgctgttttcagcatcatcggagcccttaacacacatcacgggagtaagagtgtgttagagggagcattcggtgggacagatattgccatggcttgtggatagagttcacagtccttaataatccccgagatggcagccaagagctacgttctcaatcacgcagcttcaccccagaaactgacagaaacccaacaaccaaaaggtgtccattctgacagcctcagcctgtgctggctcagatgagcaaaaatgtacagatattaataatgatgttgatttgaagagcacagaggggggtatgcatgataagggtccaaatttttaccttaaaaaagaatacatttacttctcaatcacctacataacgatcattttttaaaaaactgatcaaatttggtgttacaagggcacgttgcaaattcttctggctacttttctctgactattctaattacgttaccgtgttttctcctgtatgtgcccgttcatgtgaatgtcatttctggctacttttctctgactattctaattacgttaccgtgttttctcctgtatgtgcccgttcatgtgaatgtcatttctggctacttttctctgactattctaattacattaccgtgttttcctgtatgtgcccgttcatgtgaatgtcatttctggctacttttctctgactattctaattacgttaccatggtttctcctatatgtgcccgttcatgtgaatgtcatttctggctacttttctctgactattctaattacgttaccgtgttttctcctgtatgtgcccgttcatgtgaatgtcatttctggctacttttctctgactattctaattacattaccgtgttttcctgtatgtgcccgttcatgtgaatgtcatccaggcagatttcccaaatccggcttcctgtaaccaagggctgaaagagggaacggtttcctgggaatcctttttgcagtttattttacccggaggcagaagcccacggttccgtgaagagtctattgctctcccctctctccttttgtgtctctatttttaattgacaaaaaagcaaatgtgaagattcctggggtacaatgcaaagtgacaatgcctgtctatattgtgggatgattaaaacaaggtaagtggcatatccatcacctcacacacttatcattttgtggtgagaacatttaaaatctcatcttttagcaattttgaaatagtcattattgttaactatagtcaccatgctgtgcaacagatcaaaagaactgactcctcccatcagcagaaacttcatgccctttgaccagcatctctcctttccccgtccacgactaacccccagcccaagagaacagccaacacccacctcgctgctgccacacgacatgtcgggctttgatgggatggaggtgagggtggggaagacaattccaaagctggagcactggcctcacagctcagacactcttctacttatcctgagagaatgatgtgctgagaccaactaaacctcccctgctcttcccacatggcagaaaagaggcaacccagggaagccattgccaggacatcatggtcacccaacccttgtgcagaaaggaagcacctgcccaggatgccatagcacccaaccctcatccccaaggaaacacagcccagggcaccatggacacccaaccgtcatccccaggggaggacacagcccagggcaccatggacacccaaccctcatccccaggggaggacacagcccagggtatcttggacacccagccctcattcctaggggagtacacagcccagggcatcttggacatccaaccctcatccccagggaaggacacagcccagggcatcttggacacccaaccctcattcccataagagcacacagcccagggcatcgtggaggcccgaccctcatccctaggggaggacacagcccagggcaccatggacacccaaccctcatccccaggggaagacacaacccaggccaccattaacacccaatcatgtgcagggagggtgtccttggagcctgggactcttgccagtgaagcggtggacaagaaactgaggatgcgatcagcacacagaaatctcaggcagcctaggatacatgaggcctctcacccctgggaacactgagcagccaccaggagcccacaccttgaggtacagcaggagccatgcgctcttgctcttgctcactcacactcctgcacacagccactgacacacgccctcgtgcacgttgcagattaactccactggccttgcacttgcaacgctggaggctgagaggtatccccaggttcttttctcgtgagaggggcaggctgactttcactctcctccatgtgctagaggcagctccaccaacactggctgccctgagtggatgcacctggctctggaattcctgtcatttgctttggatccaggagcccctgcctcatgtagctacttaacagaaaggaggaatccacccaggacatgcccagacgggagcctcacaggatggacagtggtgtctggggtcacgggcagccctgacccagcagcgccagcaccagcacacccagtggggaaggcggggaggcccaaacgccacccacagtttgttactccactgggtgggacccggcacccctgccttcctgacaccctggagtccctgcctcctcctagagcccccaagcccatctgcctcagagcatccagagacagacctggggagccatttcctcaggccctggacaaggaaacagggaattccaggttatgggtgcctggggcaggtctcaggcaggtgctgggaaccagagagaggggtcaccgcgaggcctcaggcctggcaccagcactttgagcctcagtttaccagcccacgaggtgctgagtctggactggatgaccttcccacccccagtgacctctgccctttcccgagcatgtcagctctgctccagcatcctggtgtgagcgcaatgccactttttttctcaacaaatacgaaaggaggaaggtgcccccagggccctgtgccctgaggatgcctgtgtggaggggtccatttcatcactggtgtcactcacaggaagggacgaagccacctgccttgacggagcttactccacctccgccgaaggccggggaggtccctcacagagaacctgaggcccagcaggctgcagaggtgctggcatggaatgactgctcagacgcccggggccggcagagaggacggatgtgggggaggtgcacactgaggagcctctccttggaggtggagacacgtgcaccacatggaccaggacacagtccacgaagcctcgcatccccctgagctgcagctcaagggcctctctctgagcccagagtcccacccctgggaggcagctgccccagctctgagggaggagggcatccaccaggccctccatctcctgggggcaccagcccagcccagaggctctgcaggactctgcacctccaattcatggccaggactttctggatgtatcttaaggactgaggactccacatcagggaccacacaagaccggggtcccggacacgggggttgggggtgagcatgtcaccgggatgggctgtggcgtcactctggtacttcatccggacagccagggaccaaagccacgccctcagccccaccccacccctgcctcacatggcaacgcagggtctgcagatgcaggagagtgagaagcatggtagccaggcagactagaggacccgagctggggttgagcacctccctgtctacccagggcatggcctgtgagactgcaggtggcctagtgtgtgctgcaggctcaaggtcctgccccagggagcatgacattcaggcccagaaattgcatcgtgctgcacacagtccaaggggataaccctgtgaagttcaggtcaccagcaggcttggggtcaagaccgagctgcagaggacaggtttctggaaggcacagcatcatgggtggagggacttggagcaaggtccttagccccgggaccagtgaatgtgtgcccttatagggaaagggggtctgtgcagaagcaagttagctgaaaatcatgaagtggagaggctcccctggattaaaggggtgagccctaatgtaatcacaagtgtccttctaggaggttggcagagggagactgacatagacagaagccaggtgaggtgggaagcggaggcagaggccgagagagcagacgctacgccctggccctgaagacggaggaggagccgagagctcagggatggagagactggaggaggcagggaagttctccccgcaagcctggagggagcatggcctccagcacccccagaccttggccctgcaggattcatctggacctgtggtataaatggtgtttaagccactgggctgtgcaaattgtcatagcagccatggcgcattcctagagggagccctggtggggacccagcaggcagcgacggggccctcacaagcctgtgagccactcagagccgcgagagtggctaggcttggtgaggtgcaggccacgcgcacctccactaaggcagccttagggcccacacatcctctctctctctctctctctctctctctatctctctccctccctccttccctccctcccgctctcttggttggacagctctccatcatccccctggacacgaccacctcccaaggccgagctggggcgctttgctcgaggtgagcactgacatcctgggggtgtgaggggcacctgcccagcggccccgtgtgcaggatgggcggtgggccctagctggcactgggcatatggcccggctggtgcctgcaggctgcagcttttctggggtggctgggatcagtgaaggcctccagagtctgggcctgggatccctgcagtgctggctgaggacaggcggggctgggcagtgagggcactgggtcactatcaccacccacggtttattacttcactaggtgggacctggcacccctgccttcctgacaccctggaatccctgcctcctcctacagcccccaagcccatctccctcagagcctccagagacagacctggggaggcatttcttctgcccccagcagaagcccgggaggccgggaaggcacagtgggtctaaaggagaggatcccaggactgcctgaggggtgactccgacgaggcaagcatagagcccactgagaagcggggtgggagccccaccagggatgggctagttcctcatgaaggaccaggacccaggaaggacaagggggcctgctggggcagggtctgctatgccggagtccctgtgagcctggcccagacctgcctctctctttcctcattggtccccacaggtccgtggtggttgccgtatcgggaggccccatggtggcaggggtgggacacctggtatacgtcgccaggtgtgtccaataggctcatgctcacaccttctcctggcacctgggcaaagcctgagcacccaggcactgaagtgagggcaaggcctcggggccccacaggatggccgaggagacagctgcagggcgcctgggacccctgggctcaggaggtagaaggatacagcctgaaaacccacaccacaagctcaccggccagtgcaggcccacagagctcgaggaggcagccctgagcctcccagggagagatgctctgtgcacgccggcacaggccctgggttacaaaccctaggcacagcccaggagaggcccaggccccagtccagcaaggggttgcaggaagcaagaggtccccggccacagcatgagataagcccatcaagccagggccaggtgggcaatgggaggcaggcagggcttgggggtgagtccctgctgcagcgccgtccactgtcgaccggaggagtttcttccctgtgcggagtccacgggcctcctgtgagtgtgtgcatgggcacaagtgtgtgtgtggctctgctgtgtgtctgtacacacgtatgttttgggtttttttgtgtctcagaccacagagtctgcccctcccaccaaagcccaggcagaaggatgaacccacgcccctggggcccaggcctcagcagcctctgcaggatcattgttcccagttgtcacttgcctttgccacagccctatttctccacaattccttaaagtcctcaacatgcatttaaggcacaaaggtgaaactgcccagaaacatctgactccgccgtggaacccaggagcaagctgggttagctaaggagcggggccgttggcagaggctggggatccaggctgaactttggaggaggcatgtgccagcatgggctcctgactatgtcctcctgggacaaacccaaacccactctttgaatatgggagggactttgctggccccggccctgaccgcagcacttggaaactgaggagtggtcgcctcctccgtgtcacagctgcccgttcaccatcatagaagcaactctgtcacctccatgggcccctctgtggctgctgcctgggtccaagctgagcccagctgcccaggcccagaaggaaagcccaggccaggtgcccagcacagaggcagtcacataccccggggagagccacagcaagcagccaatgttgcccaggagaggagtagctgacaaggtagaacgtgagctgccatcggctcgagaggctttgctggtcctcctggggctctggacatgaccaggaggagcgagggaagaagtcgcatggtggtcccatcctgggtggggcctgatggcagctggccacccgtcccagagtggcagccagatgccagcgccattcccacagtcacatcattggtcacagaatgcaggacatagagtgtcttctttccatcacagtgctgtccagacccatagcctagggtagacctggaagattcaatgtccacacccggggctggagcgtagccatgagccacgccccctgcccgtgcatggaaagccagcccaagctctgctccatccctagccaaagtcagtgtcctttccccttctcccaagtgagctctagccacctgcctaccctgccatctgaggatgacagccttcattccattggaacctggctctgccaccagcaggcttgcagtcctgggcagactccgtcacctctctatgcctcagcctttccatctgcacaggaggaagatgatgatggtggtgatgatgatggcgatggtttccttttgcatctgaggcaaggactaattgagatgatacacatcaggcactgggtatggtgctggtccttcctgagcactcaatctatgtgagctgtccttgtgaaatgggtgtcaccacatttccccacgcagaacatcctttgtctgccatacttgaaacatctgccccaatattaacagttccttcatggaagatgtgcacacccacccaccctcatactcccaaaggtgcccgtgctttatcaagccaaagtccagccaggaactttacagcagcatccctttccctctccaagcaccaaggagcaaggcaaagcactacatcttccatctggaggcaatgccaccctcttctcccattttcactgccatccctaagaggcagtgcttccccaaaaggttccatagcagcctgcctacagcaactctgttcacacgagtttcagcatccttgcagtggctcccctgccatgctgtggctcttcattcaccctcttctcctgctccccgtgacaggcatagattctgagtgatctggatacattgctttgtttaataacattacagcttctgtgctgaaaaagatacagcagatagagaaggcaattgttgaacacaaaatagtgacagcagagatgacggcaagttggcatttttcttttctagcaataaaacttaaagctgactcaaggagaaatggaaatcataattggaacagtaatcctcaagaaagcattaagattattaaataattgccctcacagatgacttcaggccaagatggctttatgggtgaagtttagactttcacaaaactaatcagttcccataagaactgctccaggatttggaggaacatgggaaagtctattaaagggatcacaattcacagtccccagagtaaaacatgggctaacttgcattttggcaaagagccaaatgttataaatgacatcctagaaggccaaattctgtccatctcgttgaacaaggacttacaccaggaatttagaactatttatagctcatcccaccactcaggccaatgatgacccatgatcatctcaccagaaatggaaagactcagatgattaatagagtctcaatttctctgagacatctaagagcccagcccaagcccagacccaggagggcacccaggcctggacagagaacactgatatcacaccagccctccagagggaagcagagactccttcaagctctggaaacacaggcccagacagctgcctaaagttgggcaggcttcactgcaaacccaaatcatgaagctaggtaacacctttacagattctttacatttaaaaatcatcaaaacaagagtaaataataaactcaaataatattaatctaatatgtaaaggtcttgtaccattattatgcaaacaacatacataagctaataagaaaaagaacaaatcccttaagaaatcggcaaaaaggatataacacaatttctaaaagaaaacaaatggctagcacacataaggaaaacactttgtgaacagacattcttcagaacattatttataattataaaatagttgaaagcaagatagtgcctgaagaaattatggtgcatacattagtgggactattctgcaaacattcccaattatacttgtcacatatctgtgataacgtgacagccagcattcatggggtgacctcatttggtaaaagggtgcaaagctcaacacgcattgtgagatgactgtggtgtaaaattagtgggattattccgcaaacattcccaattatacttaccgcatatctgtgataacatgacagcattcatggggtgacctcatttggtaaaagggtgcaaagctcaacacgcattgtgagatgactggtgtaaatacaaagaccaaactgtgaaaaggagtccatcaattaatcgatgcttaccttcagttttgggctaatttttaaagtatgctataagcatatgctcctgttataacagaatggagggattatgagagatgatgcaggtgtgtcctgggcctcccctggcccactgggccctagagatgccttcccaggcatcgctgtcagggcttccctcagagggagtcctgtattgacctcaccaccaaggtctggagcaggggatccttagatattggttggggttatctcaccttaggtctgaatttggggttgtcttagactgttttgtgctgttagaatagaatacccaagactgggaaatttatactgaacggaaatttatttctcacagttctagaggctgtgaagtccaagagcacaggtgccagagcaagtccaagagcaagggaaagtccaaagcaagtccaggagcatctggcgaggaccttcttgctgtgtcatcacatggcggaaggcaagaaagagagcaagagggggccgaactcacccttttataacagcaccaatcccacccatgaggtggggaccttatgacctaatcactcttcatactgttacaatggcaatgaaatttcaacatgagttttggaggagagaagcattcaaaccacagcaagggtgctcctacctcctctctcagggcatctgcagaaagagctgcaactgcacgtccttcctccgtccatcctccatcccttcccaatgtccgtgcatatcctgtgacccaggaggtctggcatagggggtgctcctgccttaggtctgaggccctgtctgaagaggggtaggtgaggaggccatctgatggtctgggccaagacagtcacaggacgcatcatttatcatcaaggaggctgagggttgagtctccaggtccagggaactccccacaaagtgggaaccctgcccagctccacacagcctctgctgggggaccctgctctggtgcagagcctggggacaggtcttgagctcagccagagtctgcctccctgtcatttaggaactaaaccaagcggcaggatgctggagcccagcccccatctgaccttacagggccaaggctggggccctgggttcccctcaaggcgcagcaggactggagccccaggcagtgcaggagtggccaaagctggggcttcctccagagcccccaagcatcacggcaccaagaagggtaggaccctggcctgaggaattggcaccaaagccccagaaactaccctggacaccatggagagaggcctggaggggaagcaccaggcactgcctccccttctgatcccacctgaggtggctgccaagcccagagagccgctctgatgtcccccagccctgcagcccagggatacctgtactgtgcccctgggggacccctggccagtctgtgcaaagaagtcaccaccctacactcagagacagtgggggtcctcgtcccacatcctcagagcatggcccggctgctgcagggatggtctcctggtcctcagagcatggcccggctgctgcagggatggtctcctggtcctcagagcatggcccagctgctgcagggatggtctcctggaggccccccagtgctctattgtcagggctccctccaccccccgcaccaagagagagccagaccccagcaaggcttccagtggcttcaggtcacacccctaggctgaccccagccccattaacacctgcctgagaaagctccacgcaccagaactgaccgtctgctccaactcttgacctcccgttctcagggcgtctgctgaaaaggctgcaactgcacatccttcctccgtccgttcccgatgtccgtgtgtctcctgtggccaggaaggtctttctcgggacctgagagccgctccctgaagtgtccccattgggaaggatggggcctgtgtctccaggctctgggaggacagaatcctgacctcaacagtggccggcacggacacaactggccccatcccggggacgctgaccagcgctgggcaacttttcccttccccgacgactgagccccgagcaccctccctgctcccctaccacctccctttacaaggctgtggcctctgcacagatgataatggagcttggctcattcccctagagtcggtagggagttaaggacaaaactcagtttcctccacctgaactcaagtctgcctatgtttacctaatcacacctggtggacagtttggacaaacttgcacactcagagacacagacacttctagaaatcattatctccctgccccggggaccccactccagcagaagtctgctaggcactggcctgggccctcctgctgtcctaggaggctgctgacctcctgcctggctcctgtccccaggtccagagtcagagcagactccagggacgctgcaggctaggaagccgccccctccaggcgagggtctagtgcaggtgcccaggacaagaaagattgtgaatgcaggaatgactgggccacacccctcccgtgcacgccccctcctgccctgcaccccacagcccagccccccgtgctggatgcccccccacagcagaggtgctgttctgtgatcccctgggaaagacgccctcaacctccaccctgtcccacggcccaaggaagacaagacacaggccctctcctcacagtctccccacctggctcctgctgggaccctcaaggtgtgaacagggaggatggttgtctgggtggcccctaggagcccagatcttcactccacagaccccaacccaagcacccccttctgcagggcccagctcatccccctcctcctccctctgctctcctctcgtcgcctctacgggaaatccgggactcagcagtaaccctcaggaagcagggcccaggcgccgtttaataggaggcttcctcacaatgaaacttttagaaagccttgactacaatgatgaccttggtgtggctgtgaacactgtcagctcccacagctgctgcagcaaaaaatgtccatagacagggtgggggcccggggtcgtctgctgtcctgctcagcccacagcacgcatggaggatctgaggtgccacacctgacgcccaggccagaacatgcctccctccagggtgacctgccatgtcctgcattgctggagggacaggggcagcctatgaggatctggggccaggagatgaatcctattaacccagaggaaaactaacaggacccaagcaccctccccgttgaagctgacctgcccagaggggcctgggcccaccccacacaccggggcggaatgtgtacaggccccggtctctgtgggtgttccgctaactggggctcccagtgctcaccccacaactaaagcgagccccagcctccagagcccccgaaggagatgccgcccacaagcccagcccccatccaggaggccccagagctcagggcgccggggcagattctgaacagccccgagtcacggtgggtacaactggaacgaccaccgtgagaaaaactgtgtccaaaactctctcctggcccctgctggaggccgcgccagagaggggagcagccgccccgaacctaggtcctgctcagctcacacgacccccagcagccagagcacagtggagtccccactgaaccccactgaatggtgaggacggggaccagggctccagggggtcatggaaggggctggaccccatcctactgctatggtcccagtgctcctggccagaactgaccctaccaccgacaagagtccctcagggaaacgggggtcactggcacctcccagcatcaaccccaggcagcacaggcataaaccccacatccagagccgactccaggagcagagacaccccagtaccctgggggacaccgaccctgatgactccccactggaatccaccccagagtccaccaggaccaaagaccccgccccggtctctgtccctcactcaggacctgctgcggggcgggccatgagaccagactcgggcttagggaacaccactgtggccccaacctcgaccaggccacaggcccttccttcctgccctgcggcagcacagactttggggtctgtgcagagaggaatcacagaggccccaggctgaggtggtgggggtggaagacccccaggaggtggcccacttcccttcctcccagctggaacccaccatgaccttcttaagataggggtgtcatccgaggcaggtcctccatggagctcccttcaggctcctccctggtcctcactaggcctcagtcccggctgtgggaatgcagccaccacaggcacaccaggcagcccagacccagccagcctgcagtgcccaagcccacattctggagcagagcaggctgtgtctgggagagtctgggctccccaccgcccccggcacaccccacccacccctgtccaggccctatgcaggagggtcagagccccccatggggtatggacttagggtctcactcacgcggctcccctcctgggtgaaggggtctcatgcccagatccccacagcagagctggtcaaaggtggaggcagtggccccagggccaccctgacctggaccctcaggctcctctagccctggctgccctgctgtccctgggaggcctggactccaccagaccacaggtccagggcaccgcccataggtgctgcccacactcagttcacaggaagaagataagctccagacccccaagactgggacctgccttcctgccaccgcttgtagctccagacctccgtgcctcccccgaccacttacacacgggccagggagctgttccacaaagatcaaccccaaaccgggaccgcctggcactcgggccgctgccacttccctctccatttgctcccagcacctctgtgctccctccctcctccctccttcaggggaacagcctgtgcagcccctccctgcaccccacaccctggggaggcccaaccctgcctccagccctttctcccccgctgctcttcctgcccatccagacaaccctggggtcccatccctgcagcctacaccctggtctccacccagacccctgtctctccctccagacacccctcccaggccaaccctgcacatgcaggccctccccttttctgctgccagagcctcagtttctaccctctgtgcctaccccctgcctcctcctgcccacaactcgagctcttcctctcctggggcccctgagccatggcactgaccgtgcactcccacccccacactgcccatgccctcaccttcctcctggacactctgaccctgctcccctcttggacccagccctggtatttccaggacaaaggctcacccaagtcttccccatgcaggcccttgccctcactgcccggttacacggcagcctcctgtgcacagaagcagggagctcagcccttccacaggcagaaggcactgaaagaaatcggcctccagcaccctgatgcacgtccgcctgtgtctctcactgcccgcacctgcagggaggctcggcactccctgtaaagacgagggatccaggcagcaacatcatgggagaatgcagggctcccagacagcccagccctctcgcaggcctctcctgggaagagacctgcagccaccactgaacagccacggagcccgctggatagtaactgagtcagtgaccgacctggagggcaggggagcagtgaaccggagcccagaccatagggacagagaccagccgctgacatcccgagcccctcactggcggccccagaacaccgcgtggaaacagaacagacccacattcccacctggaacagggcagacactgctgagcccccagcaccagccctgagaaacaccaggcaacggcatcagagggggctcctgagaaagaaaggaggggaggtctccttcaccagcaagtacttcccttgaccaaaaacagggtccacgcaactcccccaggacaaaggaggagccccctgtacagcactgggctcagagtcctctccaacacaccctgagtttcagacaaaaaccccctggaaatcatagtatcagcaggagaactagccagagacagcaagaggggactcagtgactcccgcggggacaggaggattttgtgggggctcgtgtcactgtgaggatattgtagtagtaccagctgctatgcccacagtgacacagccccattcccaaagccctgctgtaaacgcttccacttctggagctgaggggctggggggagcgtctgggaagtagggcctaggggtggccatcaatgcccaaaacgcaccagactcccccccagacatcaccccactggccagtgagcagagtaaacagaaaatgagaagcagctgggaagcttgcacaggccccaaggaaagagctttggcgggtgtgcaagaggggatgcgggcagagcctgagcagggccttttgctgtttctgctttcctgtgcagatagttccataaactggtgttcaagatcgatggctgggagtgagcccaggaggacagtgtgggaagggcacagggaaggagaagcagccgctatcctacactgtcatctttcaagagtttgccctgtgcccacaatgctgcatcatgggatgcttaacagctgatgtagacacagctaaagagagaatcagtgaaatggatttgcagcacagatctgaataaattctccagaatgtggagccacacagaagcaagcacaaggaaagtgcctgatgcaagggcaaagtacagtgtgtaccttcaggctgggcacagacactctgaaaagccttggcaggaactccctgcaacaaagcagagccctgcaggcaatgccagctccagagccctccctgagagcctcatgggcaaagatgtgcagaacatatgtttgtcatagccccaaactgagaatgaagcaaacagccatctgaaggaaaacaggcaaataaacgatggcaggttcatgaaatgcaaacccagacagccagaaggacaacagtgagggttacaggtgactctgtggttgagttcatgacaatgctgagtaattggagtaacaaaggaaagtccaaaaaatactttcaatgtgatttcttctaaataaaatttacagccggcaaaatgaactatcttcttaagggataaactttccactaggaaaactataaggaaaatcaagaaaaggatgatcacataaacacagtggtcgttacttctactggggaaggaagagggtatgaactgagacacacagggttggcaagtctcctaacaagaagagaacaaatacattacagtaccttgaaaacagcagttaaaattctaaattgcaagaagaggaaaatgcacacagctgtgtttagaaaattctcagtccagcactgttcataatagcaaagacattaacccaggttggataaataaacgatgacacaggcaattgcacaatgatacagacatacattcagtatatgagacattgatgatgtatccccaaagaaatgactttaaagagaaaaggcctgatatgtggtggcactcacctccctgggcatccccggacaggctgcaggcacactgtgtggcagggcaggctggtacctgctggcagctcctggggcctgatgtggagcaggcacagagccgtatccccccgaggacatatacccccaaggacggcacagttggtacattccggagacaagcaactcagccacactcccaggccagagcccgagagggacgcccatgcacagggaggcagagcccagctcctccacagccagcagcacctgtgcaggggccgccatctggcaggcacagagcatgggctgggaggaggggcagggacaccaggcagggttggcaccaactgaaaattacagaagtctcatacatctacctcagccttgcctgacctgggcctcacctgacctggacctcacctggcctggacctcacctggcctagacctcacctctgggcttcacctgagctcggcctcacctgacttggaccttgcctgtcctgagctcacatgatctgggcctcacctgacctgggtttcacctgacctgggcttcacctgacctgggcctcatctgacctgggcctcactggcctggacctcacctggcctgggcttcacctggcctcaggcctcatctgcacctgctccaggtcttgctggaacctcagtagcactgaggctgcaggggctcatccagggttgcagaatgactctagaacctcccacatctcagctttctgggtggaggcacctggtggcccagggaatataaaaagcctgaatgatgcctgcgtgatttgggggcaatttataaacccaaaaggacatggccatgcagcgggtagggacaatacagacagatatcagcctgaaatggagcctcagggcacaggtgggcacggacactgtccacctaagccaggggcagacccgagtgtccccgcagtagacctgagagcgctgggcccacagcctcccctcggtgccctgctacctcctcaggtcagccctggacatcccgggtttccccaggcctggcggtaggtttggggtgaggtctgtgtcactgtggtattacgatttttggagtggttattatacccacagtgtcacagagtccatcaaaaacccatccctgggaacctgctgccacagccctccctgtggggcaccgccgcgtgccatgttaggattttgactgaggacacagcaccatgggtatggtggctaccgcagcagtgcagcctgtgacccaaacacacagggcagcaggcacaacagacaagcccacaagtgaccaccctgagctcctgcctgccagccctggagaccatgaaacagatggccaggattatcccataggtcagccagacctcagtccaacaggtctgcatcgctgctgccctccaataccagtccggatggggacagggccggcccacattaccatttgctgccatccggccaacagtcccagaagcccctccctcaaggctgggccacatgtgtggaccctgagagccccccatgtctgagtaggggcaccaggaaggtggggctggccctgtgcactgtcactgcccctgtggtccctggcctgcctggccctgacacctgggcctctcctgggtcatttccaagacagaagacattcccaggacagctggagctgggagtccatcatcctgcctggccatcctgagtcctgcgcctttccaaacctcacccgggaagccaacagaggaatcacctcccacaggcagagacaaagaccttccagaaatctctgtctctctccccagtgggcaccctcttccagggcagtcctcagtgatatcacagtgggaacccacatctggatcgggactgcccccagaacacaagatggcccacagggacagccccacagcccagcccttcccagacccctaaaaggcgtcccaccccctgcatctgccccagggctcaaactccaggaggactgactcctgcacaccctcctgccagacatcacctcagcccctcctggaagggacaggagcgcgcaagggtgagtcagaccctcctgccctcgatggcaggcggagaagattcagaaaggtctgagatccccaggacgcagcaccactgtcaatgggggccccagacgcctggaccagggcctgcgtgggaaaggcctctgggcacactcaggggctttttgtgaagggtcctcctactgtgtgactacagtaactaccacagtgatgaacccagcagcaaaaactgaccggactcccaaggtttatgcacacttctccgctcagagctctccaggatcagaagagccgggcccaagggtttctgcccagaccctcggcctctagggacatcttggccatgacagcccatgggctggtgccccacacatcgtctgccttcaaacaagggcttcagagggctctgaggtgacctcactgatgaccacaggtgccctggccccttccccgccagctgcaccagaccccgtcctgacagatgccccgattccaacagccaattcctggggccaggaatcgctgtagacaccagcctccttccaacacctcttgccaattgcctggattcccatcccggttggaatcaagaggacagcatcccccaggctcccaacaggcaggactcccacaccctcctctgagaggccgctgtgttccgtagggccaggctgcagacagtccccctcacctgccactagacaaatgcctgctgtagatgtccccacctggaaaagaccactcatggagcccccagccccaggtacagccatagagagagtctctgaggcccctaagaagtagccatgcccagttctgccgggaccctcggccaggctgacaggagtggacgctggagctgggcccacactgggccacataggagctcaccagtgagggcaggagagcacatgccggggagcacccagcctcctgctgaccagaggcccgtcccagagcccaggaggctgcagaggcctctccagggggacactgtgcatgtctggtccctgagcagccccccatgtccccagtcctgggggcccctggcacagctgtctggaccctctctattccctgggaagctcctcctgacagccccgcctccagttccaggtgtggttattgtcagggggtgtcagactgtggtggatacagctatggttaccacagtggtgctgcccatagcagcaaccaggccaagtagacaggcccctgctgtgcagccccaggcctccagctcacctgcttctcctggggctctcaaggctgctgttttctgcactctcccctctgtggggagggttccctcagtgggagatctgttctcaacatcccagggcctcattcctgcaaggaaggccaatggatgggcaacctcacatgccgcggctaagatagggtgggcagcctggcggggacaggacatcctgctggggtatctgtcactgtgcctagtggggcactggctcccaaacaacgcagtcctcgccaaaatccccacggcctcccccgctaggggctggcctgatctcctgcagtcctaggaggctgctgacctccagaatggctccgtccccagttccagggcgagagcagatcccaggccggctgcagactgggaggccaccccctccttcccagggttcactgcaggtgaccagggcaggaaatggcctgaacacagggataaccgggccatcccccaacagagtccaccccctcctgctctgtaccccgcacccccaaggccagcccatgacatccgacaaccccacaccagagtcactgcccggtgctgccctagggaggacccctcagcccccaccctgtctagaggactggggaggacaggacacgccctctccttatggttcccccacctggctctggctgggacccttggggtgtggacagaaaggacgcttgcctgattggcccccaggagcccagaacttctctccagggaccccagcccgagcacccccttacccaggacccagccctgcccctcctcccatctgctctcctctcatcaccccatgggaatccagaatccccaggaagccatcaggaagggctgagggaggaagtggggccactgcaccaccaggcaggaggctccgtctttgtgaacccagggaggtgccagcctcctagagggtatggtccaccctgcctatggctcccacagtggcaggctgcagggaaggaccagggacggtgtgggggagggctcagggccccgcgggtgctccatcttggatgagcccatctctctcacccacggactcacccacctcctctccaccctggccacacgtcgtccacaccatcctaagtcccacctacaccagagccggcacagccagtgcagacagaggctggggtgcaggggggccgccagggcagctttggggagggaaggatggaggaaggggagttcagtgaagaggcccccctcccctgggtccaggatcctcctctgggacccccggatcccatcccctccaggctctgggaggagaagcaggatgggagaatctgtgcgggaccctctcacagtggaatacctccacagcggctcaggcaagacccaaaagcccctcagtgagccctccactgcagtcctgggcctgggtagcagcccctcccacagaggatgaacccagcaccccgaggatgtcctgccagggggagctcagagccatgaaggagcaggatatgggacccccgatacaggcacagacctcagctccattcaggactgccacgtcctgccctgggaggaacccctttctctagtccctgcaggccaggaggcagctgactcctgacttggacgcctattccagacaccagacagaggggcaggccccccagaaccagggatgaggacgccccgtcaaggccagaaaagaccaagttgtgctgagcccagcaagggaaggtccccaaacaaaccaggaagtttctgaaggtgtctgtgtcacagtggagtatagcagctcgtcccacagtgacactcgccaggccagaaaccccatcccaagtcagcggaatgcagagagagcagggaggacatgtttaggatctgaggccgcacctgacacccaggccagcagacgtctcctgtccatggcaccctgccatgtcctgcatttctggaagaacaagggcaggctgaagggggtccaggaccaggagatgggtcccctctacccagagaaggagccaggcaggacacaagccccctccccattgaggctgacctgcccagagggtcctgggcccaccccacacaccggggcggaatgtgtgcaggcctcggtctctgtgggtgttccgctagctggggctcacagtgctcaccccacacctaaaacgagccacagcctcagagcccctgaaggagaccccgcccacaagcccagcccccacccaggaggccccagagcacagggcgccccgtcggattctgaacagccccgagtcacagtgggtataactggaactaccactgtgagaaaagcttcgtccaaaacggtctcctggccacagtcggaggccccgccagagaggggagcagccaccccaaacccatgttctgccggctcccatgaccccgtgcacctggagccccacagtgtccccactggatgggaggacaagggccgggggctccggcgggtcggggcaggggcttgatggcttccttctgccgtggctccagtgcccctggctggagttgacccttctgacaagtgtcctcagagagtcagggatcagtggcacctccctaacatcaaccccacgcagcgcaggcacaaaccccacatccagggccaactccaggaacagagacaccccaataccctgggggaccccaaccctgatgactcccgtcccatctctgtccctcacttggggcctgctgcggggcgagcacctgggagcaaactcaggattaggggacaccactgtgggcctgacctcgagcaggccacagacccttccctcctgccctggtgcagcacagactttggggtctgggcagggaggaacttctggcaggtcaccaagcacagagcccccaggctgaggtggccccagggggaaccccagcaggtggcccactacccttcctcccagctggaccccatgtcttccccaagataggggtgccatccaaggcaggtcctccatggagcccccttcaggctcctctccagaccccactgggcctcagtccccactctaggaatgcagccaccacgggcacaccaggcagcccaggcccagccaccctgcagtgcccaagcccacaccctggaggagagcagggtgcgtctgggaggggctgggctccccacccccacccccacctgcacaccccacccacccttgcccgggccccctgcaggagggtcagagcccccatgggatatggacttagggtctcactcacgcacctcccctcctgggagaaggggtctcatgcccagatccccccagcagcgctggtcacaggtagaggcagtggccccagggccaccctgacctggcccctcaggctcctctagccctggctgccctgctgtccctgggaggcctgggctccaccagaccacaggtctagggcaccgcccacactggggccgcccacacacagctcacaggaagaagataagctccagacccccaggcccgggacctgccttgctgctacgacttcctgccccagacctcgttgccctcccccgtccacttacacacaggccaggaagctgttcccacacagaccaaccccagacggggaccacctggcactcaggtcactgccatttccttctccattcacttccaatgcctctgtgcttcctccctcctccttccttcgggggagcaccctgtgcagctcctccctgcagtccacaccctggggagacccgaccctgcagcccacaccctggggagacctgaccctcctccagccctttctcccccgctgctcttgccacccaccaagacagccctggggtcctgtccctacagcccccacccagttctctacctagacccgtcttcctccctctaaacacctctcccaggccaaccctacacctgcaggccctcccctccactgccaaagaccctcagtttctcctgcctgtgcccacccccgtgctcctcctgcccacagctcgagctcttcctctcctagggcccctgagggatggcattgaccgtgccctcgcacccacacactgcccatgccctcacattcctcctggccactccagccccactcccctctcaggcctggctctggtatttctgggacaaagccttacccaagtctttcccatgcaggcctgggcccttaccctcactgcccggttacagggcagcctcctgtgcacagaagcagggagctcagcccttccacaggcagaaggcactgaaagaaatcggcctccagcgccttgacacacgtctgcctgtgtctctcactgcccgcacctgcagggaggctcggcactccctctaaagacgagggatccaggcagcagcatcacaggagaatgcagggctaccagacatcccagtcctctcacaggcctctcctgggaagagacctgaagacgcccagtcaacggagtctaacaccaaacctccctggaggccgatgggtagtaacggagtcattgccagacctggaggcaggggagcagtgagcccgagcccacaccatagggccagaggacagccactgacatcccaagccactcactggtggtcccacaacaccccatggaaagaggacagacccacagtcccacctggaccagggcagagactgctgagacccagcaccagaaccaaccaagaaacaccaggcaacagcatcagagggggctctggcagaacagaggaggggaggtctccttcaccagcaggcgcttcccttgaccgaagacaggatccatgcaactcccccaggacaaaggaggagccccttgttcagcactgggctcagagtcctctccaagacacccagagtttcagacaaaaaccccctggaatgcacagtctcagcaggagagccagccagagccagcaagatggggctcagtgacacccgcagggacaggaggattttgtgggggctcgtgtcactgtgaggatattgtactaatggtgtatgctatacccacagtgacacagccccattcccaaagccctactgcaaacgcattccacttctggggctgaggggctgggggagcgtctgggaaatagggctcaggggtgtccatcaatgcccaaaacgcaccagactcccctccatacatcacacccaccagccagcgagcagagtaaacagaaaatgagaagcaagctggggaagcttgcacaggccccaaggaaagagctttggcgggtgtgtaagaggggatgcgggcagagcctgagcagggccttttgctgtttctgctttcctgtgcagagagttccataaactggtgttcgagatcaatggctgggagtgagcccaggaggacagcgtgggaagagcacagggaaggaggagcagccgctatcctacactgtcatctttcgaaagtttgccttgtgcccacactgctgcatcatgggatgcttaacagctgatgtagacacagctaaagagagaatcagtgagatggatttgcagcacagatctgaataaattctccagaatgtggagcagcacagaagcaagcacacagaaagtgcctgatgcaaggacaaagttcagtgggcaccttcaggcattgctgctgggcacagacactctgaaaagccctggcaggaactccctgtgacaaagcagaaccctcaggcaatgccagccccagagccctccctgagagcctcatgggcaaagatgtgcacaacaggtgtttctcatagccccaaactgagagcaaagcaaacgtccatctgaaggagaacaggcaaataaacgatggcaggttcatgaaatgcaaacccagacagccacaagcacaaaagtacagggttataagcgactctggttgagttcatgacaatgctgagtaattggagtaacaaagtaaactccaaaaaatactttcaatgtgatttcttctaaataaaatttacaccctgcaaaatgaactgtcttcttaagggatacatttcccagttagaaaaccataaagaaaaccaagaaaaggatgatcacataaacacagtggtggttacttctgctggggaaggaagagggtatgaactgagatacacagggtgggcaagtctcctaacaagaacagaacgaatacattacagtaccttgaaaacagcagttaaacttctaaattgcaagaagaggaaaatggacacagttgtgtttagaaaattctcagtccagcactgttcataatagcaaagacattaacccaggtcggataaataagcgatgacacaggcaattgcacaatgatacagacatatatttagtatatgagacatcgatgatgtatccccaaataaacgactttaaagagataaagggctgatgtgtggtggcattcacctccctgggatccccggacaggttgcaggctcactgtgcagcagggcaggcgggtacctgctggcagttcctggggcctgatgtggagcaagcgcagggccatatatcccggaggacggcacagtcagtgaattccagagagaagcaactcagccacactccccaggcagagcccgagagggacgcccacgcacagggaggcagagcccagcacctccgcagccagcaccacctgtgcacgggccaccaccttgcaggcacagagtgggtgctgagaggaggggcagggacaccaggcagggtgagcacccagagaaaactgcagacgcctcacacatccacctcagcctcccctgacctggacctcactggcctgggcctcacttaacctgggcttcacctgaccttggcctcacctgacttggacctcgcctgtcccaagctttacctgacctgggcctcaactcacctgaacgtctcctgacctgggtttaacctgtcctggaactcacctggccttggcttcccctgacctggacctcatctggcctgggcttcacctggcctgggcctcacctgacctggacctcatctggcctggacctcacctggcctggacttcacctggcctgggcttcacctgacctggacctcacctggcctcgggcctcacctgcacctgctccaggtcttgctggagcctgagtagcactgagggtgcagaagctcatccagggttggggaatgactctagaagtctcccacatctgacctttctgggtggaggcagctggtggccctgggaatataaaaatctccagaatgatgactctgtgatttgtgggcaacttatgaacccgaaaggacatggccatggggtgggtagggacatagggacagatgccagcctgaggtggagcctcaggacacaggtgggcacggacactatccacataagcgagggatagacccgagtgtccccacagcagacctgagagcgctgggcccacagcctcccctcagagccctgctgcctcctccggtcagccctggacatcccaggtttccccaggcctgccggtaggtttagaatgaggtctgtgtcactgtggtattacgatattttgactggttattataaccacagtgtcacagagtccatcaaaaacccatgcctggaagcttcccgccacagccctccccatggggccctgctgcctcctcaggtcagccccggacatcccgggtttccccaggctgggcggtaggtttggggtgaggtctgtgtcactgtggtattactatggttcggggagttattataaccacagtgtcacagagtccatcaaaaacccatccctgggagcctcccgccacagccctccctgcaggggaccggtacgtgccatgttaggattttgatcgaggagacagcaccatgggtatggtggctaccacagcagtgcagcctgtgacccaaacccgcagggcagcaggcacgatggacaggcccgtgactgaccacgctgggctccagcctgccagccctggagatcatgaaacagatggccaaggtcaccctacaggtcatccagatctggctccgaggggtctgcatcgctgctgccctcccaacgccagtccaaatgggacagggacggcctcacagcaccatctgctgccatcaggccagcgatcccagaagcccctccctcaaggctgggccacatgtgtggacactgagagccctcatgtctgagtaggggcaccaggagggaggggctggccctgtgcactgtccctgcccctgtggtccctggcctgcctggccctgacacctgagcctctcctgggtcatttccaagacagaagacattcctggggacagccggagctgggcgtcgctcatcctgcccggccgtcctgagtcctgctcatttccagacctcaccggggaagccaacagaggactcgcctcccacattcagagacaaagaaccttccagaaatccctgcctctctccccagtggacaccctcttccaggacagtcctcagtggcatcacagcggcctgagatccccaggacgcagcaccgctgtcaataggggccccaaatgcctggaccagggcctgcgtgggaaaggtctctggccacactcgggctttttgtgaagggccctcctgctgtgtgactacagtaactaccatagtgatgaacccagtggcaaaaactggctggaaacccaggggctgtgtgcacgcctcagcttggagctctccaggagcacaagagccgggcccaaggatttgtgcccagaccctcagcctctagggacacctgggccatctcagcctgggctggtgccctgcacaccatcttcctccaaataggggcttcagagggctctgaggtgacctcactcatgaccacaggtgacctggcccttccctgccagctataccagaccctgtcttgacagatgccccgattccaacagccaattcctgggaccctgaatagctgtagacaccagcctcattccagtacctcctgccaattgcctggattcccatcctggctggaatcaagaaggcagcatccgccaggctcccaacaggcaggactcccgcacaccctcctctgagaggccgctgtgttccgcagggccaggccctggacagttcccctcacctgccactagagaaacacctgccattgtcgtccccacctggaaaagaccactcgtggagcccccagccccaggtacagctgtagagagagtcctcgaggcccctaagaaggagccatgcccagttctgccgggaccctcggccaggccgacaggagtggacgctggagctgggcccacactgggccacataggagctcaccagtgagggcaggagagcacatgccggggagcacccagcctcctgctgaccagaggcctgccccagagcccaggaggctgcagaggcctctccagggagacactgtgcatgtctggtacctaagcagccccccacgtccccagtcctgggggcccctggctcagctgtctggaccctccctgttccctgggaagctcctcctgacagccccgcctccagttccaggtgtggttattgtcaggcgatgtcagactgtggtggatatagtggctacgattaccacagtggtgccgcccatagcagcaaccaggccaagtagacaggcccctgctgcgcagccccaggcatccacttcacctgcttctcctggggctctcaaggctgctgtctgtcctctggccctctgtggggagggttccctcagtgggaggtctgtgctccagggcagggatgattgagatagaaatcaaaggctggcagggaaaggcagcttcccgccctgagaggtgcaggcagcaccacggagccacggagtcacagagccacggagcccccattgtgggcatttgagagtgctgtgcccccggcaggcccagccctgatggggaagcctgtcccatcccacagcccgggtcccacgggcagcgggcacagaagctgccaggttgtcctctatgatcctcatccctccagcagcatcccctccacagtggggaaactgaggcttggagcaccacccggccccctggaaatgaggctgtgagcccagacagtgggcccagagcactgtgagtaccccggcagtacctggctgcagggatcagccagagatgccaaaccctgagtgaccagcctacaggaggatccggccccacccaggccactcgattaatgctcaaccccctgccctggagacctcttccagtaccaccagcagctcagcttctcagggcctcatccctgcaaggaaggtcaagggctgggcctgccagaaacacagcaccctccctagccctggctaagacagggtgggcagacggctgtggacgggacatattgctggggcatttctcactgtcacttctgggtggtagctctgacaaaaacgcagaccctgccaaaatccccactgcctcccgctaggggctggcctggaatcctgctgtcctaggaggctgctgacctccaggatggctccgtccccagttccagggcgagagcagatcccaggcaggctgtaggctgggaggccacccctgcccttgccggggttgaatgcaggtgcccaaggcaggaaatggcatgagcacagggatgaccgggacatgccccaccagagtgcgccccttcctgctctgcaccctgcaccccccaggccagcccacgacgtccaacaactgggcctgggtggcagccccacccagacaggacagacccagcaccctgaggaggtcctgccagggggagctaagagccatgaaggagcaagatatggggcccccgatacaggcacagatgtcagctccatccaggaccacccagcccacaccctgagaggaacgtctgtctccagcctctgcaggtcgggaggcagctgacccctgacttggacccctattccagacaccagacagaggcgcaggccccccagaaccagggttgagggacgccccgtcaaagccagacaaaaccaaggggtgttgagcccagcaagggaaggcccccaaacagaccaggaggtttctgaaggtgtctgtgtcacagtggggtatagcagcagctggtaccacagtgacactcacccagccagaaaccccattccaagtcagcggaagcagagagagcagggaggacacgtttaggatctgagactgcacctgacacccaggccagcagacgtctcccctccagggcaccccaccctgtcctgcatttctgcaagatcaggggcggcctgagggggggtctagggtgaggagatgggtcccctgtacaccaaggaggagttaggcaggtcccgagcactctccccattgaggctgacctgcccagagagtcctgggcccaccccacacaccggggcggaatgtgtgcaggcctcggtctctgtgggtgttccgctagctggggctcacagtgctcaccccacacctaaaatgagccacagcctccggagcccccgcaggagaccccgcccacaagcccagcccccacccaggaggccccagagctcagggcgccccgtcggattccgaacagccccgagtcacagcgggtataaccggaaccaccactgtcagaatagctacgtcaaaaactgtccagtggccactgccggaggccccgccagagagggcagcagccactctgatcccatgtcctgccggctcccatgacccccagcacgcggagccccacagtgtccccactggatgggaggacaagagctggggattccggcgggtcggggcaggggcttgatcgcatccttctgccgtggctccagtgcccctggctggagttgacccttctgacaagtgtcctcagagagacaggcatcaccggcgcctcccaacatcaaccccaggcagcacaggcacaaaccccacatccagagccaactccaggagcagagacaccccaataccctgggggaccccgaccctgatgacttcccactggaattcgccgtagagtccaccaggaccaaagaccctgcctctgcctctgtccctcactcaggacctgctgccgggcgaggccttgggagcagacttgggcttaggggacaccagtgtgaccccgaccttgaccaggacgcagacctttccttcctttcctggggcagcacagactttggggtctgggccaggaggaacttctggcaggtcgccaagcacagaggccacaggctgaggtggccctggaaagacctccaggaggtggccactccccttcctcccagctggaccccatgtcctccccaagataagggtgccatccaaggcaggtgctccttggagccccattcagactcctccctggaccccactgggcctcagtcccagctctggggatgaagccaccacaagcacaccaggcagcccaggcccagccaccctgcagtgcccaagcacacactctggagcagagcagggtgcctctgggaggggctgagctccccaccccacccccacctgcacaccccacccacccctgcccagcggctctgcaggagggtcagagccccacatggggtatggacttagggtctcactcacgtggctcccatcatgagtgaaggggcctcaagcccaggttcccacagcagcgcctgtcgcaagtggaggcagaggcccgagggccaccctgacctggtccctgaggttcctgcagcccaggctgccctgctgtccctgggaggcctgggctccaccagaccacaggtccagggcaccgggtgcaggagccacccacacacagctcacaggaagaagataagctccagacccccagggccagaacctgccttcctgctactgcttcctgccccagacctgggcgccctcccccgtccacttacacacaggccaggaagctgttcccacacagaacaaccccaaaccaggaccgcctggcactcaggtggctgccatttccttctccatttgctcccagcgcctctgtcctccctggttcctccttcgggggaacagcctgtgcagccagtccctgcagcccacaccctggggagacccaaccctgcctggggcccttccaaccctgctgctcttactgcccacccagaaaactctggggtcctgtccctgcagtccctaccctggtctccacccagacccctgtgtatcactccagacacccctcccaggccaaccctgcacctgcaggccctgtcctcttctgtcgctagagcctcagtttctcccccctgtgcccacaccctacctcctcctgcccacaactctaactcttcttctcctggagcccctgagccatggcattgaccctgccctcccaccacccacagcccatgccctcaccttcctcctggccactccgaccccgccccctctcaggccaagccctggtatttccaggacaaaggctcacccaagtctttcccaggcaggcctgggctcttgccctcacttcccggttacacgggagcctcctgtgcacagaagcagggagctcagcccttccacaggcagaaggcactgaaagaaatcggcctccagcaccttgacacacgtccccccgtgtctctcactgcccgcacctgcagggaggctccgcactccctctaaagacaagggatccaggcagcagcatcacgggagaatgcagggctcccagacatcccagtcctctcacaggcctctcctgggaagagacctgcagccaccaccaaacagccacagaggctgctggatagtaactgagtcaatgaccgacctggagggcaggggagcagtgagccggagcccataccatagggacagagaccagccgctgacatcccgagctcctcaatggtggccccataacacacctaggaaacataacacacccacagccccacctggaacagggcagagactgctgagcccccagcaccagccccaagaaacaccaggcaacagtatcagagggggctcccgagaaagagaggaggggagatctccttcaccatcaaatgcttcccttgaccaaaaacagggtccacgcaactcccccaggacaaaggaggagccccctatacagcactgggctcagagtcctctctgagacaccctgagtttcagacaacaacccgctggaatgcacagtctcagcaggagaacagaccaaagccagcaaaagggacctcggtgacaccagtagggacaggaggattttgtggggctcgtgtcactgtgaggatattgtagtggtggtagctgctactcccacagtgacacagacccattcccaaagccctactgcaaacacacccactcctggggctgaggggctgggggagcgtctgggaagtagggtccaggggtgtctatcaatgtccaaaatgcaccagactgcccgccaaacaccaccccaccagccagcgagcagggtaaacagaaaatgagaggctctgggaagcttgcacaggccccaaggaaagagctttggcgggtgtgcaagaggggatgcaggcagagcctgagcagggccttttgctgtttctgctttcctgtgcagagagttccataaactggtgttcaagatcagtggctgggaatgagcccaggagggcagtctgtgggaagagcacagggaaggaggagcagccgctatcctacactgtcatctttcaaaagtttgccttgtgaccacactattgcatcatgggatgcttaagagctgatgtagacacagctaaagagagaatcagtgagatgaatttgcagcatagatctgaataaactctccagaatgtggagcagtacagaagcaaacacacagaaagtgcctgatgcaaggacaaagttcagtgggcaccttcaggcattgctgctgggcacagacactctgaaaagccctggcaggatctccctgcgacaaagcagaaccctcaggcaatgccagccccagagccctccctgagagcgtcatggggaaagatgtgcagaacagctgattatcatagactcaaactgagaacagagcaaacgtccatctgaagaacagtcaaataagcaatggtaggttcatgcaatgcaaacccagacagccaggggacaacagtagagggctacaggcggctttgcggttgagttcatgacaatgctgagtaattggagtaacagaggaaagcccaaaaaatacttttaatgtgatttcttctaaataaaatttacaccaggcaaaatgaactgtcttcttaagggataaactttcccctggaaaaactacaaggaaaattaagaaaacgatgatcacataaacacagttgtggttacttctactggggaaggaagagggtatgagctgagacacacagagtcggcaagtctccaagcaagcacagaacgaatacattacagtaccttgaatacagcagttaaacttctaaatcgcaagaagaggaaaatgcacacagctgtgtttagaaaattctcagtccagcactattcataatagcaaagacattaacccaggttggataaataaatgatgacacaggcaattgcacaatgatacagacatacatttagtacatgagacatcgatgatgtatccccaaagaaatgactttaaagagaaaaggcctgatgtgtggtggcactcacctccctgggatccccggacaggttgcaggcacactgtgtggcagggcaggctggtacatgctggcagctcctggggcctgatgtggagcaagcgcagggctgtatacccccaaggatggcacagtcagtgaattccagagagaagcagctcagccacactgcccaggcagagcccgagagggacgcccacgcacagggaggcagagcccagctcctccacagccaccaccacctgtgcacgggccaccaccttgcaggcacagagtgggtgctgagaggaggggcagggacaccaggcagggtgagcacccagagaaaactgcagaagcctcacacatccacctcagcctcccctgacctggacctcacctggtctggacctcacctggcctgggcctcacctgacctggacctcacctggcctgggcttcacctgacctggacctcacctggcctccggcctcacctgcacctgctccaggtcttgctggaacctgagtagcactgaggctgcagaagctcatccagggttggggaatgactctggaactctcccacatctgacctttctgggtggaggcatctggtggccctgggaatataaaaagccccagaatggtgcctgcgtgatttgggggcaatttatgaacccgaaaggacatggccatggggtgggtagggacatagggacagatgccagcctgaggtggagcctcaggacacagttggacgcggacactatccacataagcgagggacagacccgagtgttcctgcagtagacctgagagcgctgggcccacagcctcccctcggtgccctgctgcctcctcaggtcagccctggacatcccgggtttccccaggccagatggtaggtttgaagtgaggtctgtgtcactgtggtattatgattacgtttgggggagttatcgttatacccacagcatcacacggtccatcagaaacccatgccacagccctccccgcaggggaccgccgcgtgccatgttacgattttcatcgaggacacagcgccatgggtatggtggctaccacagcagtgcagcccatgacccaaacacacagggcagcaggcacaatggacaggcctgtgagtgaccatgctgggctccagcccgccagccccggagaccatgaaacagatggccaaggtcaccccacagttcagccagacatggctccgtggggtctgcatcgctgctgccctctaacaccagcccagatggggacaaggccaaccccacattaccatctcctgctgtccacccagtggtcccagaagcccctccctcatggctgagccacatgtgtgaaccctgagagcaccccatgtcagagtaggggcagcagaagggcggggctggccctgtgcactgtccctgcacccatggtccctcgcctgcctggccctgacacctgagcctcttctgagtcatttctaagatagaagacattcccggggacagccggagctgggcgtcgctcatcccgcccggccgtcctgagtcctgcttgtttccagacctcaccagggaagccaacagaggactcacctcacacagtcagagacaaagaaccttccagaaatccctgtctcactccccagtgggcaccttcttccaggacattcctcggtcgcatcacagcaggcacccacatctggatcaggacggcccccagaacacaagatggcccatggggacagccccacaacccaggccttcccagacccctaaaaggcgtcccaccccctgcacctgccccagggctaaaaatccaggaggcttgactcccgcataccctccagccagacatcacctcagccccctcctggaggggacaggagcccgggagggtgagtcagacccacctgccctcgatggcaggcggggaagattcagaaaggcctgagatccccaggacgcagcaccactgtcaatgggggccccagacgcctggaccagggcctgcgtgggaaaggccgctgggcacactcaggggctttttgtgaaggcccctcctactgtgtgactacggtgactaccacagtgatgaaactagcagcaaaaactggccggacacccagggaccatgcacacttctcagcttggagctctccaggaccagaagagtcaggtctgagggtttgtagccagaccctcggcctctagggacaccctggccatcacagcggatgggctggtgccccacatgccatctgctccaaacaggggcttcagagggctctgaggtgacttcactcatgaccacaggtgccctggccccttccccgccagctacaccgaaccctgtcccaacagctgccccagttccaacagccaattcctggggcccagaattgctgtagacaccagcctcgttccagcacctcctgccaattgcctggattcacatcctggctggaatcaagagggcagcatccgccaggctcccaacaggcaggactcccgcacaccctcctctgagaggccgctgtgttccgcagggccaggccctggacagttcccctcacctgccactagagaaacacctgccattgtcgtccccacctggaaaagaccactcgtggagcccccagccccaggtacagctgtagagagactccccgagggatctaagaaggagccatgcgcagttctgccgggaccctcggccaggccgacaggagtggacactggagctgggcccacactgggccacataggagctcaccagtgagggcaggagagcacatgccggggagcacccagcctcctgctgaccagaggcctgccccagagcccaggaggctgcagaggcctctccagggggacactgtgcatgtctggtccctgagcagccccccacgtccccagtcctgggggcccctggcacagctgtctggaccctccctgttccctgggaagctcctcctgacagccccgcctccagttccaggtgtggttattgtcagggggtgtcagactgtggtggatacagctatggttaccacagtggtgctgcccatagcagcaaccaggccaagtagacaggcccctgctgtgcagccccaggcctccagctcacctgcttctcctggggctctcaaggtcactgttgtctgtactctgccctctgtggggagggttccctcagtgggaggtctgttctcaacatcccagggcctcatgtctgcacggaaggccaatggatgggcaacctcacatgccgcggctaagatagggtgggcagcctggcgggggacagtacatactgctggggtgtctgtcactgtgcctagtggggcactggctcccaaacaacgcagtcctcgccaaaatccccacagcctcccctgctaggggctggcctgatctcctgcagtcctaggaggctgctgacctccagaatgtctccgtccccagttccagggcgagagcagatcccaggccggctgcaaactgggaggccaccccctccttcccagggttcactggaggtgaccaaggtaggaaatggccttaacacagggatgactgcgccatcccccaacaaattcagccccctcctgctctgtaccccgcaccccccaggccagtccacgaaaaccagggccccacatcagagtcactgcctggcccggccctggggcggacccctcagcccccaccctgtctagaggacttggggggacaggacacaggccctctccttatggttcccccacctgcctccggccgggacccttggggtgtggacagaaaggacacctgcctaattggcccccaggaacacagaacttctctccagggaccccagcccgagcacccccttacccaggacccagccctgcccctcctcccctctgctctcctctcatcaccccatgggaatccggtatccccaggaagccatcaggaagggctgaaggaggaagcggggccgtgcaccaccgggcaggaggctccgtcttcgtgaacccagggaagtgccagcctcctagagggtatggtccaccctgcctggggctcccaccgtggcaggctgcggggaaggaccagggacggtgtgggggagggctcagggccctgcgggtgctcctccatcttcggtgagcctcccccttcacccaccgtcccgcccacctcctctccaccctggctgcacgtcttccacaccatcctgagtcctacctacaccagagccagcaaagccagtgcagacaaaggctggggtgcaggggggctgccagggcagcttcggggagggaaggatggagggaggggaggtcagtgaagaggcccccttcccctgggtccaggatcctcctctggacccccggatcccatcccctcctggctctgggaggagaagcaggatgggagaatctgtgcgggaccctctcacagtggaatatccccacagcggctcaggccagacccaaaagcccctcagtgagccctccactgcagtcctgggcctgggtagcagcccctcccacagaggacagacccagcaccccgaagaagtcctgccagggggagctcagagccatgaaagagcaggatatggggtccccgatacaggcacagacctcagctccatccaggcccaccgggacccaccatgggaggaacacctgtctccgggttgtgaggtagctggcctctgtctcggaccccactccagacaccagacagaggggcaggccccccaaaaccagggttgagggatgatccgtcaaggcagacaagaccaaggggcactgaccccagcaagggaaggctcccaaacagacgaggaggtttctgaagctgtctgtatcacagtggggtatagcagtggctggtaccacagtgacactcgccaggccagaaaccccgtcccaagtcagcggaagcagagagagcagggaggacacgtttaggatctgaggccgcacctgacacccagggcagcagacgtctcccctccagggcaccctccaccgtcctgcgtttcttcaagaataggggcggcctgagggggtccagggccaggcgataggtcccctctaccccaaggaggagccaggcaggacccgagcaccgtccccattgaggctgacctgcccagacgggcctgggcccaccccacacaccggggcggaatgtgtgcaggccccagtctctgtgggtgttccgctagctggggcccccagtgctcaccccacacctaaagcgagccccagcctccagagccccctaagcattccccgcccagcagcccagcccctgcccccacccaggaggccccagagctcagggcgcctggtcggattctgaacagccccgagtcacagtgggtataactggaacgaccaccgtgagaaaaactgtgtccaaaactgactcctggcagcagtcggaggccccgccagagaggggagcagccggcctgaacccatgtcctgccggttcccatgacccccagcacccagagccccacggtgtccccgttggataatgaggacaagggctgggggctccggtggtttgcggcagggacttgatcacatccttctgctgtggccccattgcctctggctggagttgacccttctgacaagtgtcctcagaaagacagggatcaccggcacctcccaatatcaaccccaggcagcacagacacaaaccccacatccagagccaactccaggagcagagacaccccaacactctgggggaccccaaccgtgataactccccactggaatccgccccagagtctaccaggaccaaaggccctgccctgtctctgtccctcactcagggcctcctgcagggcgagcgcttgggagcagactcggtcttaggggacaccactgtgggccccaactttgatgaggccactgacccttccttcctttcctggggcagcacagactttggggtctgggcagggaagaactactggctggtggccaatcacagagcccccaggccgaggtggccccaagaaggccctcaggaggtggccactccacttcctcccagctggaccccaggtcctccccaagataggggtgccatccaaggcaggtcctccatggagcccccttcagactcctcccgggaccccactggacctcagtccctgctctgggaatgcagccaccacaagcacaccaggaagcccaggcccagccaccctgcagtgggcaagcccacactctggagcagaacaaggtgcgtctgggaggggctaacctccccaccccccaccccccatctgcacacagccacctaccactgcccagaccctctgcaggagggccaagccaccatggggtatggacttagggtctcactcacgtgcctcccctcttgggagaaggggcctcatgcccagatccctgcagcactagacacagctggaggcagtggccccagggccaccctgacctggcatctaaggctgctccagcccagacagcactgccgttcctgggaagcctgggctccaccagaccacaggtccagggcacagcccacaggagccacccacacacagctcacaggaagaagataagctccagaccccagggcgggacctgccttcctgccaccacttacacacaggccagggagctgttcccacacagatcaaccccaaaccgggactgcctggcactagggtcactgccatttccctctccattccctcccagtgcctctgtgctccctccttctggggaacaccctgtgcagcccctccctgcagcccacacgctggggagaccccaccctgcctcgggccttttctacctgctgcacttgccgcccacccaaacaaccctgggtacgtgaccctgcagtcctcaccctgatctgcaaccagacccctgtccctccctctaaacacccctcccaggccaactctgcacctgcaggccctccgctcttctgccacaagagcctcaggttttcctacctgtgcccaccccctaacccctcctgcccacaacttgagttcttcctctcctggagcccttgagccatggcactgaccctacactcccacccacacactgcccatgccatcaccttcctcctggacactctgaccccgctcccctccctctcagacccggccctggtatttccaggacaaaggctcacccaagtcttccccatgcaggcccttgccctcactgcctggttacacgggagcctcctgtgcgcagaagcagggagctcagctcttccacaggcagaaggcactgaaagaaatcggcctccagtgccttgacacacgtccgcctgtgtctctcactgcctgcacctgcagggaggctccgcactccctctaaagatgagggatccaggcagcaacatcacgggagaatgcagggctcccagacagcccagccctctcgcaggcctctcctgggaagagacctgcagccaccactgaacagccacggaggtcgctggatagtaaccgagtcagtgaccgacctggagggcaggggagcagtgaaccggagcccataccatagggacagagaccagccgctaacatcccgagcccctcactggcggccccagaacaccccgtggaaagagaacagacccacagtcccacctggaacagggcagacactgctgagcccccagcaccagccccaagaaacactaggcaacagcatcagagggggctcctgagaaagagaggaggggaggtctccttcaccatcaaatgcttcccttgaccaaaaacagggtccacgcaactcccccaggacaaaggaggagccccctgtacagcactgggctcagagtcctctctgagacaggctcagtttcagacaacaacccgctggaatgcacagtctcagcaggagagccaggccagagccagcaagaggagactcggtgacaccagtctcctgtagggacaggaggattttgtgggggttcgtgtcactgtgagcatattgtggtggtgactgctattcccacagtgacacaaccccattcctaaagccctactgcaaacgcacccactcctgggactgaggggctgggggagcatctgggaagtatggcctaggggtgtccatcaatgcccaaaatgcaccagactctccccaagacatcaccccaccagccagtgagcagagtaaacagaaaatgagaagcagctgggaagcttgcacaggccccaaggaaagagctttggcaggtgtgcaagaggggatgtgggcagagcctcagcagggccttttgctgtttctgctttcctgtgcagagagttccataaactggtattcaagatcaatggctgggagtgagcccaggaggacagtgtgggaagagcacagggaaggaggagcagccgctatcctacactgtcatcttttgaaagtttgccctgtgcccacaatgctgcatcatgggatgcttaacagctgatgtagacacagctaaagagagaatcagtgaaatgcatttgcagcacagatctgaataaatcctccagaatgtggagcagcacagaagcaagcacacagaaagtgcctgatgccaaggcaaagttcagtgggcaccttcaggcattgctgctgggcacagacactctgaaaagcactggcaggaactgcctgtgacaaagcagaaccctcaggcaatgccagccctagagcccttcctgagaacctcatgggcaaagatgtgcagaacagctgtttgtcatagccccaaactatggggctggacaaagcaaacgtccatctgaaggagaacagacaaataaacgatggcaggttcatgaaatacaaactaggacagccagaggacaacagtagagagctacaggcggctttgcggttgagttcatgacaatgctgagtaattggagtaacagaggaaagcccaaaaaatacttttaatgtgatttcttctaaataaaatttacacccggcaaaatgaactatcttcttaagggataaactttcccctggaaaaactataaggaaaatcaagaaaacgatgatcacataaacacagtggtggttacttctactggggaaggaagagggtatgagctgagacacacagagtcggcaagtctcctaacaagaacagaacaaatacattacagtaccttgaaaacagcagttaaacttctaaatcgcaagaagaggaaaatgcacacacctgtgtttagaaaattctcagtccagcactgttcataatagcaaagacattaacccaggttggataaataagcgatgacacaggcaattgcacaatgatacagacatacattcagtatatgagacatcgatgatgtatccccaaagaaatgattttaaagagaaaaggcctgatgtgtggtggcaatcacctccctgggcatccccggacaggctgcaggctcactgtgtggcagggcaggcaggcacctgctggcagctcctggggcctgatgtggagcaggcacagagctgtatatccccaaggaaggtacagtcagtgcattccagagagaagcaactcagccacactccctggccagaacccaagatgcacacccatgcacagggaggcagagcccagcacctccgcagccaccaccacctgcgcacgggccaccaccttgcaggcacagagtgggtgctgagaggaggggcagggacaccaggcagggtgagcacccagagaaaactgcagaagcctcacacatccacctcagcctcccctgacctggacctcacctggcctgggcctcacctgacctggacctcacctggcctgggcttcacctggcctgggcttcacctgacctggacctcacctggcctcgggcctcacctggcctgggcttcacctggcctgggcttcacctgacctggacctcacctggcctgggcctcacctgacctggacctcacctggcctgggcttcacctggcctgggcttcacctggcctgggcttcacctgacctggacctcacctggcctgggcttcacctgacctggacctcacctggcctcgggcctcacctgcacctgctccaggtcttgctggagcctgagtagcactgaggctgtagggactcatccagggttggggaatgactctgcaactctcccacatctgacctttctgggtggaggcacctggtggcccagggaatataaaaagccccagaatgatgcctgtgtgatttgggggcaatttatgaacccgaaaggacatggccatggggtgggtagggacagtagggacagatgtcagcctgaggtgaagcctcaggacacaggtgggcatggacagtgtccacctaagcgagggacagacccgagtgtccctgcagtagacctgagagcgctgggcccacagcctcccctcggggccctgctgcctcctcaggtcagccctggacatcccgggtttccccaggcctggcggtaggtttgaagtgaggtctgtgtcactgtggtattactatgatagtagtggttattactaccacagtgtcacagagtccatcaaaaactcatgcctgggagcctcccaccacagccctccctgcgggggaccgctgcatgccgtgttaggattttgatcgaggacacggcgccatgggtatggtggctaccacagcagtgcagcccatgacccaaacacacggggcagcagaaacaatggacaggcccacaagtgaccatgatgggctccagcccaccagccccagagaccatgaaacagatggccaaggtcaccctacaggtcatccagatctggctccaaggggtctgcatcgctgctgccctcccaacgccaaaccagatggagacagggccggccccatagcaccatctgctgccgtccacccagcagtcccggaagcccctccctgaacgctgggccacgtgtgtgaaccctgcgagccccccatgtcagagtaggggcagcaggagggcggggctggccctgtgcactgtcactgcccctgtggtccctggcctgcctggccctgacacctgagcctctcctgggtcatttccaagacattcccagggacagccggagctgggagtcgctcatcctgcctggctgtcctgagtcctgctcatttccagacctcaccagggaagccaacagaggactcacctcacacagtcagagacaacgaaccttccagaaatccctgtttctctccccagtgagagaaaccctcttccagggtttctcttctctcccaccctcttccaggacagtcctcagcagcatcacagcgggaacgcacatctggatcaggacggcccccagaacacgcgatggcccatcgggacagcccagcccttcccagacccctaaaaggtatccccaccttgcacctgccccagggctcaaactccaggaggcctgactcctgcacaccctcctgccagatatcacctcagccccctcctggaggggacaggagcccgggagggtgagtcagacccacctgccctcaatggcaggcggggaagattcagaaaggcctgagatccccaggacgcagcaccactgtcaatgggggccccagacgcctggaccagggcctgtgtgggaaaggcctctggccacactcaggggctttttgtgaagggccctcctgctgtgtgactacggtggtaactcccacagtgatgaaaccagcagcaaaaactgaccggactcgcagggtttatgcacacttctcggctcggagctctccaggagcacaagagccaggcccgagggtttgtgcccagaccctcggcctctagggacacccgggccatcttagccgatgggctgatgccctgcacaccgtgtgctgccaaacaggggcttcagagggctctgaggtgacttcactcatgaccacaggtgccctggtcccttcactgccagctgcaccagaccctgttccgagagatgccccagttccaaaagccaattcctggggccgggaattactgtagacaccagcttcattccagtacctcctgccaattgcctggattcccatcctggctggaatcaagagggcagcatccgccaggtcccaacaggcaggactcccacacaccctcctctgagaggccgctgtgttccgcagggccaggccgcagacagttcccctcacctgcccatgtagaaacacctgccattgtcgtccccacctggcaaagaccacttgtggagcccccagccccaggtacagctgtagagagagtcctcgaggcccctaagaaggagccatgcccagttctgccgggaccctcggccaggccgacaggagtggacgctggagctgggcccacactgggccacataggagctcaccagtgagggcaggagagcacatgccggggagcacccagcctcctgctgaccagagacccgtcccagagcccaggaggctgcagaggcctctccagggggacacagtgcatgtctggtccctgagcagcccccaggctctctagcactgggggcccctggcacagctgtctggaccctccctgttccctgggaagctcctcctgacagccccgcctccagttccaggtgtggttattgtcagggggtgccaggccgtggtagagatggctacaattaccacagtggtgccgcccatagcagcaaccaggccaagtagacagacccctgccacgcagccccaggcctccagctcacctgcttctcctggggctctcaaggctgctgtctgccctctggccctctgtggggagggttccctcagtgggaggtctgtgctccagggcagggatgactgagatagaaatcaaaggctggcagggaaaggcagcttcccgccctgagaggtgcaggcagcaccacagagccatggagtcacagagccacggagcccccagtgtgggcgtgtgagggtgctgggctcccggcaggcccagccctgatggggaagcctgccccgtcccacagcccaggtccccaggggcagcaggcacagaagctgccaagctgtgctctacgatcctcatccctccagcagcatccactccacagtggggaaactgagccttggagaaccacccagccccctggaaacaaggcggggagcccagacagtgggcccagagcactgtgtgtatcctggcactaggtgcagggaccacccggagatccccatcactgagtggccagcctgcagaaggacccaaccccaaccaggccgcttgattaagctccatccccctgtcctgggaacctcttcccagcgccaccaacagctcggcttcccaggccctcatccctccaaggaaggccaaaggctgggcctgccaggggcacagtaccctcccttgccctggctaagacagggtgggcagacggctgcagataggacatattgctggggcatcttgctctgtgactactgggtactggctctcaacgcagaccctaccaaaatccccactgcctcccctgctaggggctggcctggtctcctcctgctgtcctaggaggctgctgacctccaggatggcttctgtccccagttctagggccagagcagatcccaggcaggctgtaggctgggaggccacccctgtccttgccgaggttcagtgcaggcacccaggacaggaaatggcctgaacacagggatgactgtgccatgccctacctaagtccgcccctttctactctgcaacccccactccccaggtcagcccatgacgaccaacaacccaacaccagagtcactgcctggccctgccctggggaggacccctcagcccccaccctgtctagaggacttggggggacaggacacaggccctctccttatggttcccccacctggctcctgccgggacccttggggtgtggacagaaaggacgcctgcctaattggcccccaggaacccagaacttctctccagggaccccagcccgagcacccccttacccaggacccagccctgcccctcctcccctctgctctcctctcatcactccatgggaatccagaatccccaggaagccatcaggaagggctgaaggaggaagcggggccgctgcaccaccgggcaggaggctccgtcttcgtgaacccagggaagtgccagcctcctagagggtatggtccaccctgcctggggctcccaccgtggcaggctgcggggaaggaccagggacggtgtgggggagggctcaggtccctgcaggtgctccatcttggatgagcccatccctctcaccaccgacccgcccacctcctctccaccctggccacacgtcgtccacaccatcctgagtcccacctacaccagagccagcagagccagtgcagacagaggctggggtgcaggggggccgccagggcagctttggggagggaggaatggaggaaggggaggtcagtgaagaggcccccctcccctgggtctaggatccacctttgggacccccggatcccatcccctccaggctctgggaggagaagcaggatgggagaatctgtgcgggaccctctcacagtggaatacctccacagcggctcaggccagatacaaaagcccctcagtgagccctccactgcagtgctgggcctgggggcagcccctcccacagaggacagacccagcaccccgaagaagtcctgccagggggagctcagagccatgaaggagcaagatatggggaccccaatactggcacagacctcagctccatccaggcccaccaggacccaccatgggtggaacacctgtctccggcccctgctggctgtgaggcagctggcctctgtctcggacccccattccagacaccagacagagggacaggccccccagaaccagtgttgagggacacccctgtccagggcagccaagtccaagaggcgcgctgagcccagcaagggaaggcccccaaacaaaccaggaggtttctgaagctgtctgtgtcacagtcgggtatagcagcggctaccacaatgacactgggcaggacagaaaccccatcccaagtcagccgaaggcagagagagcaggcaggacacatttaggatctgaggccacacctgacactcaagccaacagatgtctcccctccagggcgccctgccctgttcagtgttcctgagaaaacaggggcagcctgaggggatccagggccaggagatgggtcccctctaccccgaggaggagccaggcgggaatcccagccccctccccattgaggccatcctgcccagaggggcccggacccaccccacacacccaggcagaatgtgtgcaggcctcaggctctgtgggtgccgctagctggggctgccagtcctcaccccacacctaaggtgagccacagccgccagagcctccacaggagaccccacgcagcagcccagcccctacccaggaggccccagagctcagggcgcctgggtggattctgaacagccccgagtcacggtgggtatagtgggagctactaccactgtgagaaaagctatgtccaaaactgtctcccggccactgctggaggcccagccagagaagggaccagccgcccgaacatacgaccttcccagacctcatgacccccagcacttggagctccacagtgtccccattggatggtgaggacgggggccggggccatctgcacctcccaacatcacccccaggcagcacaggcacaaaccccaaatccagagccgacaccaggaacacagacaccccaataccctgggggaccctggccctggtgacttcccactgggatccacccccgtgtccacctggatcaaagaccccaccgctgtctctgtccctcactcagggcctgctgaggggcgggtgctttggagcagactcaggtttaggggccaccattgtggggcccaacctcgaccaggacacagatttttctttcctgccctggggcaacacagactttggggtctgtgcagggaggaccttctggaaagtcaccaagcacagagccctgactgaggtggtctcaggaagacccccaggagggggtttgtgccccttcctctcatgtggaccccatgccccccaagataggggcatcatgcagggcaggtcctccatgcagccaccactaggcaactccctggcgccggtccccactgcgcctccatcccggctctggggatgcagccaccatggccacaccaggcagcccgggtccagcaaccctgcagtgcccaagcccttggcaggattcccagaggctggagcccacccctcctcatccccccacacctgcacacacacacctaccccctgcccagtccccctccaggaagggttggagccgcccatagggtgggcgctccaggtctcactcactcgcttcccttcctgggcaaaggagcctcgtgccccggtcccccctgacggcgctgggcacaggtgtgggtactgggccccagggctcctccagccccagctgccctgctctccctgggaggcctgggcaccaccagaccaccagtccagggcacagccccagggagccgcccactgccagctcacaggaagaagataagcttcagaccctcagggccgggagctgccttcctgccaccccttcctgccccagacctccatgccctcccccaaccacttacacacaagccagggagctgtttccacacagttcaaccccaaaccaggatggcctggcactcgggtcactgccatttctgtctgcattcgctcccagcgcccctgtgttccctccctcctccctccttcctttcttcctgcattgggttcatgccgcagagtgccaggtgcaggtcagccctgagcttggggtcacctcctcactgaaggcagcctcagggtgcccaggggcaggcagggtgggggtgaggcttccagctccaaccgctccactagccgagactaaggaagtgagaggcagccagaaatccagaccattccatagcaaatggatttcattaaagttaccagacttcagtgtaagtaacatgagccccatgcacaacaatcccttatgaaggggaagtcagtgtcgcctcggatttcttgaaaaacacaaaaacttatcaatgcctgtaaaagtctgttggaaagaaaatatgattcaagaatgttatgcccaacaaagctggcatattttctacccggacacactcagggaatgtggtcccttgagtgcttctctcactgcgtaaatcctacgtggtgtttaagcatattcataaatgtgtatgtctatttttatgtgtaagatggttcatttttattttatttattcaatatgtacaataaagaatattgacaaataggctggacatggtggctcccacctgtaatcccagccctttgggaggccgaggcgggcagatcacctgaggtctggagttcgagaccagcctggccaacatgatgaaaacccatctctactaaaaatacaaagattagccaggcatggtggtgcatgcctgtaatcccagccactcaggaggctgagacaggagaaatgcgtgaacccggaaggcggaggttgcagtgagccgagatcacaccactgcactccagcctggcgacagagcaagattccatctcaaaaaaaaaaaagacaaagaattttgtttttttgaataaagacaaatttcatcacacgaaaataaaaatgcaaagctccaaacaggaaggcacggacagcacagtgaaccccggagcgggcgctggggggccaggggcatggcgggggtgccagcgtctctcggtgcctaccatggccactccagcctgtgttctcacgaggatggctgtgcaatgctaggagcgtgttcgaagctctagggcaaccactggaagtgaggctgaggagcagagcccagaggcccgtggagctgatgaaaagaaagctggagaaagtgtttgctgcctcccaacatggtaagaaaagatagaaagagagagcacacggcaaagggagcttgctgagggactctttacaatggcttgcacagagctcagggggtctgggaggctagggccctgcgcagggcagtcaccccagcctgctgaccaaggtttgctgcaggcagctctgggggtggttgaggcgcggtccctggagccacccctcaagggaacgaggcagcagagtgggccaaggcccaggtcggctgcaaggctgcccaggacttggggtccttacatcagcagccactgatgcagctggcccagagagaggcgccgagcaggttgcctccaggggacaaaccaggtcggagagggtgaggcagtggatggagccacaacaaccccgggcacgggtgacacgcacgttcatgcacatctgacccttcctccctcaccaaacaggtccccctgccttccccatggttgcgaaaaagcaaaatgtagacgttttttcttttttaattcatgttttaattgacaaatgaagccgtatatatttattgtgtacaacatgatgctttaaaatatgtatacatcgtggaacagcaacgttgagctaatttaacacgcattacttcacatacttgtcatcttttgtggcgagaatgcttaaaatccactctcttagtattttttaagaatgcaatacattgttgtcaactgtggtcaccgtcatgcatagccaagctcccgacctcaccctcctgccagctcaggctgtgcatcctttcaccagcatcccccaccccggcccctggccctggtaactaccactctatactctacgtatgagttcagctttttaagattccacagatgaatgagatcatacagtatttgctttctatgcctggcttattttagttaacacactgtcctccagatccatccgttgttgcaaatgacagggtttcattctttttaaagtctaaagagtattccattgtgtcaatggacctcatttgctttatccatgcatcaactatggacatttaggttgattccatttcttagctgttgtggatggtgctgcagtaaacatggggctgcagatgtctcttcaacatactgacatcatgtcctttggataaatacccagtagtgggatcgctggatcacaatgtacagttttttttttaatggaaactttcattttttggtgaaattaggaaaacagataaaacccacagaatccaaaatatatgtgaagatgccaaaaacagttgacattgggcagaggtcacatggaaggaagtgaatacatgacggggtgtgagggcccagaggcagctgaaatacgctttctaaacacaaggacctcttctgagagggcagaagttttatcctgcacatgcaatgaccagcacagctaaaatacactttctaaacatgaggacctcttctgagagggcagctttatcctgcaaatgcaatgaccagcacaggacccagaataaagagagttgccagcggacgcctggtgtccatgtgtccaggtgagttcgagatgcggacggcgctggccagccagtcacaccctaagtcaatctgctgcatgcatttgtccttgccacagcagaaaacgagaaagcctttgggctgcaaagcttcacaggctcctcttctcccgactccatggaaacagctacaaagagcaggcccagtagagcttaattcatgaaaatgagtaataaacttgaactggaacagtatcgactttttagaaacggcagcaaagtgtataaaaaatattcaccagaacaatatttccaaacgatgagatgagaatttcagccaagtaatcctccatggatagaaaataatgaagggattggatttatgaaggaaaatcatggagctcaaatacaagagaagagaatcaaaaatgaacaggaggagataaaatatggtttggccaaagttacaaaataaattttttaaaaacccttcatcatggcaagtagaaagagcgagaggaaaaacagatcccgtggaagacacaaataggacatggggagaaaaatgaatgagatgaaacagagcagaaataaaattttacggaactaaagacaagtgatctgaacctgcctggggcctgggggacctcgccaccctgaagggaaagaacatgcctggctggctttgccacctgctcattgcagagccccacagcttgcaacaaacataggcggtagccagggagtggttacagcaggccttgagcaagacccagtgttgtgctgacttcaggtctgacccagcactgtcatagtggtggtgtccatagtggtagtgggggtgcttgtgtcactccacccccatctccaggaggctcagaacagacagagagagactccatttgtttgggagaaagtaagggatgagaacaagagtctctgcctggtaatccagagaattattctagatcttggccaagattatcaaagcagtacctctatgagtcttttgggcttggagtccccctaaagcagatatagctaagatcacaacacccaagtccttttgaatatgtgggaagacttcccaaggacaggagcaaacaaacaagcccagactgcaaaaaaacaagccgagactgcaataaacacctcactcttcaatgcccaggcactgaagaacatctcctagcagcaacaccatccaggaaaacatggcctcaaccagtgaactaaataaggcaccagggaccagtctcggagaaatagaggtatgttatctttcagagaattcaaagtagctttgttgaggaaactcaaagaaattcaagataacacagtgaaggaattcagaatcctatccgataaatttaacagagattgaagcaattaaaaagaattaagcagaaattatggagctgaaaaatgcaattggcatactgaaaaatgcatcagagtattttcatagcctcatatatcaagtagaagaaagaattagtgagcttgaaaacaggctatttggaaaagcacgataaaaggagacaaaagagaaaagaataaataacaatgaagcatatctacaggatctagaaaatagcctcaaaaggccaaatctaagaattattagccttaaagaggaggtagagaaagagggatggagagtttattcaaagggataataacagaaaacttcccaaacctagagaaagatatcaatatccaaatgcaagaaggatgtagtacaccaaggagatttaatgcaaagaagactacctcaaggcattcaatactcaaactcccatatgacaaggactttaaaaagatcctaaaagcagcaaaagaaaagaaatgaataaaatactatggagctccaatatgtctggcagcagacttttcagtgaagactttatatgccaggagagagtgtcataatggatttaaagtgctgaaggaaaaaacttttaccctcgaacagtatagctggtgaaattatccttcaaacatgaaggagaaataatttgtttccagacaaatgttgagggatttcatgaacaccagacctgtcttttaagaaatgctaaagggagtacttcaatcagaaagaaacacgttagtgaacaataagaaatcatctgaaggcacaaaactcaccggtaatagtaagtacacagaaaaacacagaatattataacactgtaactgtggtgtgtaaactccttttgtttgtttgtttgtttgtttgtttgtttgtttttgtttttagacggagttttgctccagcccaggctggagtgcaatggcacaatctcagctcactgcaacttccacctcccgggttcaagcaattctcctgcctcagcctcccaagtagctgggattacaggcatgtgctaccatgtccagctaattttgtattttagtagagacagtgtttcaccatgttggtcaggctaaccttatcttgagtagaaaaactaaatgatgaagcaatgaaaaataataactacaacttttcaagacatagtacaataagatataaatcataacaaaaagttaaaaggtggagggatgaagttaaggcatagagtctttattagttttctttttacttgtctgtttatgcaaacagtgttaagttgtcatcagtttaaaataatgggtcataagatactatttgcaagcctcatggtaacgtcaaaccaaaagcaatacaacagatacacaaaaaacaaaaagcaagaagctaaattacgtcatcagagaaaatcaccttcactaaaaggaagacggagaaaagaatgaagagagagaagaccaaaagcaaatagcaatatggcaggagtaagtccttacttatcaataataccattgaatgtaaatggactaaactctccaatcaaaagacatagagtggctgaatcaattaaagaaaaaacaagacccattgatctgttgtccacaagaaacacactttatctataaagacacacatagactgaaaacaaagggatggaaaaagatactccacgccaatggaaaccaaagaaagagcaggagtagctacacttatatcaggcaaaatagatttcaagacaaaaactataagaagagacaaggtcactaatgataaacaggtcaattcagcaagaggatataacaattgtaaatatatatgcacccaatgctggagcacccagatatataaagcaagtatttactagagctaaagagagaaatagactccaatgcaataatagctggagatttcaacatcccactttcaacattgaacagatcctccagatagaaaatcaacaaagaaatattggacttaatctgcactatcgaccaaatggatctaacagatatttacagaacatttcatccaacagctgcagaacacacattcttttcctcagcacatagatcattctcaaggatagaccatatgttgggtcacaaaacaagttttaaaatattcaaatacattgaaataatatcaagcatcttctgtgaccacaatggactaaaactagaaatcaataacaagaggaattttggaaactatataaatatatggaaattaatgaatgctgagtgggtcaatgaagcaattaagaaggaaactgaaatttttcttggaacgaatgatcatggaaacagaaaataccaaaacctatgggatacagcaaaagcagtactaagagggaagtttacagctacaaatgcttacattaaaaaagaagaaaaacttcaataaaaaaacctaacaatgcatcttaaagaactagaaaagcaagaggaaatcaaatccaaaattagtagaagaaaacagtaaaggtcagagcagaaataagtaaaattgaaatgaagaaaacaatacaaaagatcaataaaacaacaggttgttttcttgaaaagttaaacaaaattgacaaacctttagccagactaagaaaaaaagacagaagatccaaataaataaaatcagagatgaaaaaggtgacattacaacttacaccacagaaattcaaaggatcattagtggctactataagcaactatatgccaataaattggaaaatctagaagaaatgcagaaattcctagacacatacaacctcccaagattaaaccaagaagaaattcaaaacctgaacagactgataacaagtaatgagatcaaagccgtaataaaaagcctcccagtaaagagaagcccaggacccgacggcttcactgctgaattctaccaaacatttaaagtagaactaataccaatcctactcaaactattccaaaaaatagaggtggaaggaatacttcaaaactcattatacgaggccagtattaacctgacaccaaaactagacaaagacacatgaaaaaaagaaaactacaggccaatatgtctgatgaatattgacacaaaaatcctcaacaaaatactagcaaaccaaattcaactacacattagaaagttcactcatcatgaccaagtggaatttatctaacttgggatgcaaagatggttcaacatatgcaaatcaatcaatgtgatacatcatatcaacagaatgaacaacaaaaaccatttgatcatttaattgatactgaaaaagcatttgataaaattcaacattccttcataataaaaattctcttctatactaggtacaaaagaaacttacctcaacataataaagccatatatgacagtcccacagtatgatactaaatgaggaaaaactgagagcctttcctctacgatctggaacatgacaaagatgcccactttcatcactgttattcaacatagtactggaagtcctagctggagcgatcagacaagagaaagatataaaagacatccaaattggaaaggaataagtcaaattatcctcatttgcatatggtatgatcttctatttagagctaactaaagactccaccaaaaaaagttattagaactgacgaacaaattcagtaaagctgcaggatacaaaatcaacatacaaaaatcagtagcatttctatatgccaacaatgaccaatgtgaaaaagaaattaaaaagtaaccctatttacaataaccacaaataaacacctaggaattaaccaaagaggtaaaagatttctgtaatgaaaactataaaacactgatgaaagaaattgaagagtacaccaaaaaatggaaagcaattgcatgttcatggattagaagaatcagtgttgttataatgtccatactatccaaagcaatctacagattcaatgcaatccttatcaaaataccaatgacatcattcacagaaatagaaaaaaaaaatcctaaaatttacgtggaaccacaaagacccagaatagccaaagctctcctaagcaaaaagaacgaaactgtaggaatgacattgcctgtcttcaaattctactacagagctatagatagtaaccaaaacagcgtggtactggcataaaaacagacacagagacaaacagaacaaaatttaaaaacccagaaataaatccacacacctacagcaaattcatttttgacaaagttgccaagaacatactctggggaatagataatgatatctcttcaataaatagtgtggggaaaactggatatccatatacataacagtgaaactagacccctctctctctcactatatacaaaaatcaaatcaaaattgtttaaggacttaaatctaagacctcatactatgaaaccactgcaagacaaccttggcggaaactctccaagacatcagtccaggcaaagatttcttgagtaatatcccacaagcacagacaaccaaagcaaaaatggacaaatgggatcacatcaagttaaaaagcttctgcacagtaagggaaacaaccaacaaaatgaagagacaacccacagaatgggagaaaatatttgaaaaatacccatctggcaagggattaaaaaccagaatatatgcagaatatataaggagctcaaacagtgctatagaaaaaaaaatctaataatctgatttaaaaatgggaaaaatgttagaatagacatttcttaaaataagacatacagatggcaaaccgacatggaacggtgctcaacatcatggattatcacagaaacacaatcaatcaaaactaaaactaaaatgtgctatcatctcaccccagttaaaatggctgatatccagaagacaggcaataacaaatgctggcaaggatgtggggaaaagggagcccccatacactgttgctgggattgtaaattagtacaaccactgtggagagcagcatgaaagttcctcaaaaaactgaaagaaagctaccataggatccagcaatcccactgctgtgtatatactacaaaagaaaggaagtcagtatatgaagaggtatctgcactcccatgtttgttgcagccctgttcacaacagccaagatttggaagcaacctaagtgtccatcagcagttgaatgtataaagaaaatgtggtgcatatacacaatggagtattattcaataataaaaaggaatgagattgagtcatttgcaacaacatggatggaactggagatcattatgtgaagtgaaataagccaggcacagaaagacaaacattacaatgttcttacttattaatgagatctaaaaatcaaaacaattgcacccatgttcataaagagtaaaaggatggttaccagatgctgagaacggtggtggggggatagggaaaggtggcagtggttaacgggtacaaaaaaatagaaagaatgaataagacttgctacttgatagcacagcaaggtggctatagtcagtaatttagttgtatatttttaataatgaaaggtgtataattggattgtttctaacacaaaggataatgcttaagaggatggataccccattttccatgatgtgattatttcacattgcacgcctagatcaaaacatccaatgtaccccataaatatatacatcttctatgtacccataaaaattctgtaaaataaaatatataaaaagaggtgacagatatggaagacaggcaaagaagagacgacatccacataatccgagtacctaagaaagaatggagtccagtgcatctcaggagccaccattctaagccaattttctctggttctctcagtcaccctaccaatacgtgggcaatcttgttttatttcaggatagagtttttgaaattatagatttaagtatgctttctgttctattacttttggtaattaattttagaaagaactaatttgggcacaaatttgaaaaaattctaaatcccaaaaaaaaaagaaaaaaacacacacacaatcatctataagggggatgatgaccagtcctagatttctcaccagccacattcaagatcagtaaatggtaggacaaaacctgtagggtccttaagggggaaagaagtagtggatagtccagagtctatatacagccaactgttcttgaagaaaaaaggctgctgaaaaggagttccaaacattctataatccataatctcatgatgaaactactagaggaagaccaccagccatcaaaaggtgcttggagaacccagggccaagaaccaaaagtaaatattaagtgtccttaactgcgagactaagatagaaatgactgtgggggaccatgtggcctcaacagaggtgaaatggtgtctgcctgacaaagtggacattttacaatgatcaaaacacagaatatgagatagagagcacttctgaattactgcctcactccaaataactctcagccaaaggacttcagtaaaaccaaattgggcatattagacagtacaaacaaattctaagaaaataatattactgattacaatcacatgatgctagagatggaggggaaaaggaagaggaaaccaggtaatttcatactcgtatatagtaaagaactaaagtacattgtccaaagaagaacaaagaatattttggaaagttataaaggtagccactacacatagaagatagcaaagaacaagaaaacttaagatggaaaactttttggaagcataaaaatagaaaatataaactactaagataagattgaagccaaacagatctatgaaaacaacaaacatcaatggccttaacttgcctattaaaaggaagagactttcaaattggaccacaagataaaacccaactctatatagcatatgagtattacacacaaaatgggaaaagctgaaaaaacttgggcaaaattcaccccaagcaaattccactgtttcctttgggacaaaatgccaagctccatgccagggaagatgattctcctcagaccttctcctcactctcccagtcctcttagggaaggaattgggtgttagaggagggagactctgtcgattatcagctgaagcagtggtgtgctcctgcgttgcttctgacctgggaaatgaagcagcaagactctttctgctgtgtctttgcccagaagggccatccccccagagcagagtacccaggccggcaggagcagtggtggaagcgtggaaaccacgtctcctacagcagagaccatcagaagcggagcctcgggtataagggaaacaacgcgttctccctaacctgggagtgacagacagcgtcattcctcacagtgataccctgtgttctagccatctggcccatgacagagccagcccagagccagcccagagccagcccctgaccatcctggagcctggccagctcgccaagctgcaccataggcctggaaggcgtggagacctgcggcagtgccctgtcctcccgtgaggcctgccatccctgccaggggtcgcctctggcttctccttctccaggaccgcacggtccagaggctcagtgcctggagtaggtgttgcctccctgcttctaggcccagaccctcccttgttcctgaccccgggcctttccctctggcttggacatccagggccctgtctcagctggggagctgctcctgctcaaggactgtcttccgcgggatcgaaaggccgcgtcctgaacaatgcgtgggccacgtgagcggagcaggctctaaaggccgcgtcctaaacagtgcgtgggccacgtgagcggagcaggctctaaaggccgcgtcctaaacagtgcgtgggccacgtgagcggagcaggctctaaaggccgcgtcctaaacagtgcgtgggccacgtgagcggagcaggctctaaaggccacgtcctaaacagtgcgtgggccacgtgagcggagcaggctctaaaggccgcgtcctaaacagtgcgtgggccacgggagcggagcagactctaaaggccgcgtcctaaacagtgtgtgggccacgtgagcgaagcgccctctccactgccctcggggccgcagctcccagctcagctcccagccctgctcagggcagccaggccaggaggtaccatccaggctaagtgaccctcaggggggacaggtgccccaggagatgccagctgttgggagaggctgggggaccaactcgacctggcctgtgggccctgccctggccacccattgtaggatccagccgccacgcctgtgacactcgtgtgctttccctggtgtgtgcttgtggcaggtgggggcagagggtcctcaggccagagagccactcccccagcgccagaccaccctcttcctcactcccccacctcaccccctcacaggtgcctcccaggccatcagggcccaaccacccctaaacaaatgggttctcggcccctcgtggctggaggtgggttctctcaccattcccagcctaagactccatccccatgctggcagctgttcaaccatgtctagagagatccactgtcccagacagcacctcagggtcccccgtcctgcctggaaccctgtaggaaactccacaaaccgccgccattctgtccacacccctacaggagccccaaccctctccccacatccaggcttccctcccagacccctcatccctgcccgcacggtgcctgagggggccttcttgggcagcgcctaagcaagcccccagcacccttcggccccttcaaggcacacaggccccctttccacccagcctcaggaaaccacctgtgtcctccaacgacaggtcccagcctcccagcctttgccttgcctgttcctctccctggaactctgccccgacacagaccctccccagcaagcccgcaggggcacctcccctgcccccagacaccctgtgcccgtcagttcatccccagcagaggccctcaccacgcacacccccatgctcacacctggccccaggcctcagcctccctgagggccccacccagcccgcgtctggccagtggtgcgtgcaaagcccctcacccagactcggcggaaggcagccagtgcaggcctggggaggggctctccttagaccaccttgcaccttccgtggcacccaccatgggaagagctgagactcactgaggac

SEQ ID NO: 35 - DNA, 1354 bp, Human
atgagctctaagtacccgcggtctgtccggcgctgcctgcccctctgggccctaacactggaagcagctctcattctcctcttctatttttttacccactatgacgcttccttagaggatcaaaaggggctcgtggcatcctatcaagttggccaagatctgaccgtgatggcggccattggcttgggcttcctcacctcgagtttccggagacacagctggagcagtgtggccttcaacctcttcatgctggcgcttggtgtgcagtgggcaatcctgctggacggcttcctgagccagttcccttctgggaaggtggtcatcacactgttcagtattcggctggccaccatgagtgctttgtcggtgctgatctcagtggatgctgtcttggggaaggtcaacttggcgcagttggtggtgatggtgctggtggaggtgacagctttaggcaacctgaggatggtcatcagtaatatcttcaacacagactaccacatgaacatgatgcacatctacgtgttcgcagcctattttgggctgtctgtggcctggtgcctgccaaagcctctacccgagggaacggaggataaagatcagacagcaacgatacccagtttgtctgccatgctgggcgccctcttcttgtggatgttctggccaagtttcaactctgctctgctgagaagtccaatcgaaaggaagaatgccgtgttcaacacctactatgctgtagcagtcagcgtggtgacagccatctcagggtcatccttggctcacccccaagggaagatcagcaagacttatgtgcacagtgcggtgttggcaggaggcgtggctgtgggtacctcgtgtcacctgatcccttctccgtggcttgccatggtgctgggtcttgtggctgggctgatctccgtcgggggagccaagtacctgccggggtgttgtaaccgagtgctggggattccccacagctccatcatgggctacaacttcagcttgctgggtctgcttggagagatcatctacattgtgttgctggtgcttgataccgtcggagccggcaatggcatgattggcttccaggtcctcctcagcattggggaactcagcttggccatcgtgatagctctcacgtctggtctcctgacaggtttgctcctaaatcttaaaatatggaaagcacctcatgaggctaaatattttgatgaccaagttttctggaagtttcctcatttggctgttggattttaagcaaaagcatccaagaaaaacaaggcctgttcaaaaacaagacaacttcctctcactgttgcctgcatttgtacgtgagaaacgctcatgacagcaaagt

SEQ ID NO: 36 - DNA, 26 bp, Artificial Sequence
  Made in a laboratory from synthetic material
cagacaagcttctacgtaccatcaga

SEQ ID NO: 37 - DNA, 25 bp, Artificial Sequence
  Made in a laboratory from synthetic material
gatcagaattcctcagtgaagaata

SEQ ID NO: 38 - DNA, 2791 bp, Human
gaaccatcattaattgaagtgagatttttctggcctgagacttgcagggaggcaagaagacactctggacaccactatggacagcctcttgatgaaccggaggaagtttctttaccaattcaaaaatgtccgctgggctaagggtcggcgtgagacctacctgtgctacgtagtgaagaggcgtgacagtgctacatccttttcactggactttggttatcttcgcaataagaacggctgccacgtggaattgctcttcctccgctacatctcggactgggacctagaccctggccgctgctaccgcgtcacctggttcacctcctggagcccctgctacgactgtgcccgacatgtggccgactttctgcgagggaaccccaacctcagtctgaggatcttcaccgcgcgcctctacttctgtgaggaccgcaaggctgagcccgaggggctgcggcggctgcaccgcgccggggtgcaaatagccatcatgaccttcaaagattatttttactgctggaatacttttgtagaaaaccatgaaagaactttcaaagcctgggaagggctgcatgaaaattcagttcgtctctccagacagcttcggcgcatccttttgcccctgtatgaggttgatgacttacgagacgcatttcgtactttgggactttgatagcaacttccaggaatgtcacacacgatgaaatatctctgctgaagacagtggataaaaaacagtccttcaagtcttctctgtttttattcttcaactctcactttcttagagtttacagaaaaaatatttatatacgactctttaaaaagatctatgtcttgaaaatagagaaggaacacaggtctggccagggacgtgctgcaattggtgcagttttgaatgcaacattgtcccctactgggaataacagaactgcaggacctgggagcatcctaaagtgtcaacgtttttctatgacttttaggtaggatgagagcagaaggtagatcctaaaaagcatggtgagaggatcaaatgtttttatatcaacatcctttattatttgattcatttgagttaacagtggtgttagtgatagatttttctattcttttcccttgacgtttactttcaagtaacacaaactcttccatcaggccatgatctataggacctcctaatgagagtatctgggtgattgtgaccccaaaccatctctccaaagcattaatatccaatcatgcgctgtatgttttaatcagcagaagcatgtttttatgtttgtacaaaagaagattgttatgggtggggatggaggtatagaccatgcatggtcaccttcaagctactttaataaaggatcttaaaatgggcaggaggactgtgaacaagacaccctaataatgggttgatgtctgaagtagcaaatcttctggaaacgcaaactcttttaaggaagtccctaatttagaaacacccacaaacttcacatatcataattagcaaacaattggaaggaagttgcttgaatgttggggagaggaaaatctattggctctcgtgggtctcttcatctcagaaatgccaatcaggtcaaggtttgctacattttgtatgtgtgtgatgcttctcccaaaggtatattaactatataagagagttgtgacaaaacagaatgataaagctgcgaaccgtggcacacgctcatagttctagctgcttgggaggttgaggagggaggatggcttgaacacaggtgttcaaggccagcctgggcaacataacaagatcctgtctctcaaaaaaaaaaaaaaaaaaaagaaagagagagggccgggcgtggtggctcacgcctgtaatcccagcactttgggaggccgagccgggcggatcacctgtggtcaggagtttgagaccagcctggccaacatggcaaaaccccgtctgtactcaaaatgcaaaaattagccaggcgtggtagcaggcacctgtaatcccagctacttgggaggctgaggcaggagaatcgcttgaacccaggaggtggaggttgcagtaagctgagatcgtgccgttgcactccagcctgggcgacaagagcaagactctgtctcagaaaaaaaaaaaaaaaagagagagagagagaaagagaacaatatttgggagagaaggatggggaagcattgcaaggaaattgtgctttatccaacaaaatgtaaggagccaataagggatccctatttgtctcttttggtgtctatttgtccctaacaactgtctttgacagtgagaaaaatattcagaataaccatatccctgtgccgttattacctagcaacccttgcaatgaagatgagcagatccacaggaaaacttgaatgcacaactgtcttattttaatcttattgtacataagtttgtaaaagagttaaaaattgttacttcatgtattcatttatattttatattattttgcgtctaatgattttttattaacatgatttccttttctgatatattgaaatggagtctcaaagcttcataaatttataactttagaaatgattctaataacaacgtatgtaattgtaacattgcagtaatggtgctacgaagccatttctcttgatttttagtaaacttttatgacagcaaatttgcttctggctcactttcaatcagttaaataaatgataaataattttggaagctgtgaagataaaataccaaataaaataatataaaagtgatttatatgaagttaaaataaaaaatcagtatgatggaataaacttg

SEQ ID NO: 39 - protein, 198 aa, Human [sequence omitted]

SEQ ID NO: 40 - DNA, 8603 bp, Artificial Sequence
  Made in a laboratory from synthetic material
gacggatcgggagatctcccgatcccctatggtcgactctcagtacaatctgctctgatgccgcatagttaagccagtatctgctccctgcttgtgtgttggaggtcgctgagtagtgcgcgagcaaaatttaagctacaacaaggcaaggcttgaccgacaattgcatgaagaatctgcttagggttaggcgttttgcgctgcttcgcgatgtacgggccagatatacgcgttgacattgattattgactagttattaatagtaatcaattacggggtcattagttcatagcccatatatggagttccgcgttacataacttacggtaaatggcccgcctggctgaccgcccaacgacccccgcccattgacgtcaataatgacgtatgttcccatagtaacgccaatagggactttccattgacgtcaatgggtggactatttacggtaaactgcccacttggcagtacatcaagtgtatcatatgccaagtacgccccctattgacgtcaatgacggtaaatggcccgcctggcattatgcccagtacatgaccttatgggactttcctacttggcagtacatctacgtattagtcatcgctattaccatggtgatgcggttttggcagtacatcaatgggcgtggatagcggtttgactcacggggatttccaagtctccaccccattgacgtcaatgggagtttgttttggcaccaaaatcaacgggactttccaaaatgtcgtaacaactccgccccattgacgcaaatgggcggtaggcgtgtacggtgggaggtctatataagcagagctctctggctaactagagaacccactgcttactggcttatcgaaattaatacgactcactatagggagacccaagcttggtacctcagccagcatggcagcctctttcccacccaccttgggactcagttctgccccagatgaaattcagcacccacatattaaattttcagaatggaaatttaagctgttccgggtgagatcctttgaaaagacacctgaagaagctcaaaaggaaaagaaggattcctttgaggggaaaccctctctggagcaatctccagcagtcctggacaaggctgatggtcagaagccagtcccaactcagccattgttaaaagcccaccctaagttttcaaagaaatttcacgacaacgagaaagcaagaggcaaagcgatccatcaagccaaccttcgacatctctgccgcatctgtgggaattcttttagagctgatgagcacaacaggagatatccagtccatggtcctgtggatggtaaaaccctaggccttttacgaaagaaggaaaagagagctacttcctggccggacctcattgccaaggttttccggatcgatgtgaaggcagatgttgactcgatccaccccactgagttctgccataactgctggagcatcatgcacaggaagtttagcagtgccccatgtgaggtttacttcccgaggaacgtgaccatggagtggcacccccacacaccatcctgtgacatctgcaacactgcccgtcggggactcaagaggaagagtcttcagccaaacttgcagctcagcaaaaaactcaaaactgtgcttgaccaagcaagacaagcccgtcagcgcaagagaagagctcaggcaaggatcagcagcaaggatgtcatgaagaagatcgccaactgcagtaagatacatcttagtaccaagctccttgcagtggacttcccagagcactttgtgaaatccatctcctgccagatctgtgaacacattctggctgaccctgtggagaccaactgtaagcatgtcttttgccgggtctgcattctcagatgcctcaaagtcatgggcagctattgtccctcttgccgatatccatgcttccctactgacctggagagtccagtgaagtcctttctgagcgtcttgaattccctgatggtgaaatgtccagcaaaagagtgcaatgaggaggtcagtttggaaaaatataatcaccacatctcaagtcacaaggaatcaaaagagatttttgtgcacattaataaagggggccggccccgccaacatcttctgtcgctgactcggagagctcagaagcaccggctgagggagctcaagctgcaagtcaaagcctttgctgacaaagaagaaggtggagatgtgaagtccgtgtgcatgaccttgttcctgctggctctgagggcgaggaatgagcacaggcaagctgatgagctggaggccatcatgcagggaaagggctctggcctgcagccagctgtttgcttggccatccgtgtcaacaccttcctcagctgcagtcagtaccacaagatgtacaggactgtgaaagccatcacagggagacagatttttcagcctttgcatgcccttcggaatgctgagaaggtacttctgccaggctaccaccactttgagtggcagccacctctgaagaatgtgtcttccagcactgatgttggcattattgatgggctgtctggactatcatcctctgtggatgattacccagtggacaccattgcaaagaggttccgctatgattcagctttggtgtctgctttgatggacatggaagaagacatcttggaaggcatgagatcccaagaccttgatgattacctgaatggccccttcactgtggtggtgaaggagtcttgtgatggaatgggagacgtgagtgagaagcatgggagtgggcctgtagttccagaaaaggcagtccgtttttcattcacaatcatgaaaattactattgcccacagctctcagaatgtgaaagtatttgaagaagccaaacctaactctgaactgtgttgcaagccattgtgccttatgctggcagatgagtctgaccacgagacgctgactgccatcctgagtcctctcattgctgagagggaggccatgaagagcagtgaattaatgcttgagctgggaggcattctccggactttcaagttcatcttcaggggcaccggctatgatgaaaaacttgtgcgggaagtggaaggcctcgaggcttctggctcagtctacatttgtactctttgtgatgccacccgtctggaagcctctcaaaatcttgtcttccactctataaccagaagccatgctgagaacctggaacgttatgaggtctggcgttccaacccttaccatgagtctgtggaagaactgcgggatcgggtgaaaggggtctcagctaaacctttcattgagacagtcccttccatagatgcactccactgtgacattggcaatgcagctgagttctacaagatcttccagctagagataggggaagtgtataagaatcccaatgcttccaaagaggaaaggaaaaggtggcaggccacactggacaagcatctccggaagaagatgaacctcaaaccaatcatgaggatgaatggcaactttgccaggaagctcatgaccaaagagactgtggatgcagtttgtgagttaattccttccgaggagaggcacgaggctctgagggagctgatggatctttacctgaagatgaaaccagtatggcgatcatcatgccctgctaaagagtgcccagaatccctctgccagtacagtttcaattcacagcgttttgctgagctcctttctacgaagttcaagtataggtatgagggaaaaatcaccaattattttcacaaaaccctggcccatgttcctgaaattattgagagggatggctccattggggcatgggcaagtgagggaaatgagtctggtaacaaactgtttaggcgcttccggaaaatgaatgccaggcagtccaaatgctatgagatggaagatgtcctgaaacaccactggttgtacacctccaaatacctccagaagtttatgaatgctcataatgcattaaaaacctctgggtttaccatgaaccctcaggcaagcttaggggacccattaggcatagaggactctctggaaagccaagattcaatggaattttaagtagggcaaccacttatgagttggatccactagtaacggccgccagtgtgctggaattctgcagatatccatcacactggcggccgctcgagcatgcatctagagggccctattctatagtgtcacctaaatgctagagctcgctgatcagcctcgactgtgccttctagttgccagccatctgttgtttgcccctcccccgtgccttccttgaccctggaaggtgccactcccactgtcctttcctaataaaatgaggaaattgcatcgcattgtctgagtaggtgtcattctattctggggggtggggtggggcaggacagcaagggggaggattgggaagacaatagcaggcatgctggggatgcggtgggctctatggcttctgaggcggaaagaaccagctggggctctagggggtatccccacgcgccctgtagcggcgcattaagcgcggcgggtgtggtggttacgcgcagcgtgaccgctacacttgccagcgccctagcgcccgctcctttcgctttcttcccttcctttctcgccacgttcgccggctttccccgtcaagctctaaatcggggcatccctttagggttccgatttagtgctttacggcacctcgaccccaaaaaacttgattagggtgatggttcacgtagtgggccatcgccctgatagacggtttttcgccctttgacgttggagtccacgttctttaatagtggactcttgttccaaactggaacaacactcaaccctatctcggtctattcttttgatttataagggattttggggatttcggcctattggttaaaaaatgagctgatttaacaaaaatttaacgcgaattaattctgtggaatgtgtgtcagttagggtgtggaaagtccccaggctccccaggcaggcagaagtatgcaaagcatgcatctcaattagtcagcaaccaggtgtggaaagtccccaggctccccagcaggcagaagtatgcaaagcatgcatctcaattagtcagcaaccatagtcccgcccctaactccgcccatcccgcccctaactccgcccagttccgcccattctccgccccatggctgactaattttttttatttatgcagaggccgaggccgcctctgcctctgagctattccagaagtagtgaggaggcttttttggaggcctaggcttttgcaaaaagctcccgggagcttgtatatccattttcggatctgatcaagagacaggatgaggatcgtttcgcatgattgaacaagatggattgcacgcaggttctccggccgcttgggtggagaggctattcggctatgactgggcacaacagacaatcggctgctctgatgccgccgtgttccggctgtcagcgcaggggcgcccggttctttttgtcaagaccgacctgtccggtgccctgaatgaactgcaggacgaggcagcgcggctatcgtggctggccacgacgggcgttccttgcgcagctgtgctcgacgttgtcactgaagcgggaagggactggctgctattgggcgaagtgccggggcaggatctcctgtcatctcaccttgctcctgccgagaaagtatccatcatggctgatgcaatgcggcggctgcatacgcttgatccggctacctgcccattcgaccaccaagcgaaacatcgcatcgagcgagcacgtactcggatggaagccggtcttgtcgatcaggatgatctggacgaagagcatcaggggctcgcgccagccgaactgttcgccaggctcaaggcgcgcatgcccgacggcgaggatctcgtcgtgacccatggcgatgcctgcttgccgaatatcatggtggaaaatggccgcttttctggattcatcgactgtggccggctgggtgtggcggaccgctatcaggacatagcgttggctacccgtgatattgctgaagagcttggcggcgaatgggctgaccgcttcctcgtgctttacggtatcgccgctcccgattcgcagcgcatcgccttctatcgccttcttgacgagttcttctgagcgggactctggggttcgaaatgaccgaccaagcgacgcccaacctgccatcacgagatttcgattccaccgccgccttctatgaaaggttgggcttcggaatcgttttccgggacgccggctggatgatcctccagcgcggggatctcatgctggagttcttcgcccaccccaacttgtttattgcagcttataatggttacaaataaagcaatagcatcacaaatttcacaaataaagcatttttttcactgcattctagttgtggtttgtccaaactcatcaatgtatcttatcatgtctgtataccgtcgacctctagctagagcttggcgtaatcatggtcatagctgtttcctgtgtgaaattgttatccgctcacaattccacacaacatacgagccggaagcataaagtgtaaagcctggggtgcctaatgagtgagctaactcacattaattgcgttgcgctcactgcccgctttccagtcgggaaacctgtcgtgccagctgcattaatgaatcggccaacgcgcggggagaggcggtttgcgtattgggcgctcttccgcttcctcgctcactgactcgctgcgctcggtcgttcggctgcggcgagcggtatcagctcactcaaaggcggtaatacggttatccacagaatcaggggataacgcaggaaagaacatgtgagcaaaaggccagcaaaaggccaggaaccgtaaaaaggccgcgttgctggcgtttttccataggctccgcccccctgacgagcatcacaaaaatcgacgctcaagtcagaggtggcgaaacccgacaggactataaagataccaggcgtttccccctggaagctccctcgtgcgctctcctgttccgaccctgccgcttaccggatacctgtccgcctttctcccttcgggaagcgtggcgctttctcaatgctcacgctgtaggtatctcagttcggtgtaggtcgttcgctccaagctgggctgtgtgcacgaaccccccgttcagcccgaccgctgcgccttatccggtaactatcgtcttgagtccaacccggtaagacacgacttatcgccactggcagcagccactggtaacaggattagcagagcgaggtatgtaggcggtgctacagagttcttgaagtggtggcctaactacggctacactagaaggacagtatttggtatctgcgctctgctgaagccagttaccttcggaaaaagagttggtagctcttgatccggcaaacaaaccaccgctggtagcggtggtttttttgtttgcaagcagcagattacgcgcagaaaaaaaggatctcaagaagatcctttgatcttttctacggggtctgacgctcagtggaacgaaaactcacgttaagggattttggtcatgagattatcaaaaaggatcttcacctagatccttttaaattaaaaatgaagttttaaatcaatctaaagtatatatgagtaaacttggtctgacagttaccaatgcttaatcagtgaggcacctatctcagcgatctgtctatttcgttcatccatagttgcctgactccccgtcgtgtagataactacgatacgggagggcttaccatctggccccagtgctgcaatgataccgcgagacccacgctcaccggctccagatttatcagcaataaaccagccagccggaagggccgagcgcagaagtggtcctgcaactttatccgcctccatccagtctattaattgttgccgggaagctagagtaagtagttcgccagttaatagtttgcgcaacgttgttgccattgctacaggcatcgtggtgtcacgctcgtcgtttggtatggcttcattcagctccggttcccaacgatcaaggcgagttacatgatcccccatgttgtgcaaaaaagcggttagctccttcggtcctccgatcgttgtcagaagtaagttggccgcagtgttatcactcatggttatggcagcactgcataattctcttactgtcatgccatccgtaagatgcttttctgtgactggtgagtactcaaccaagtcattctgagaatagtgtatgcggcgaccgagttgctcttgcccggcgtcaatacgggataataccgcgccacatagcagaactttaaaagtgctcatcattggaaaacgttcttcggggcgaaaactctcaaggatcttaccgctgttgagatccagttcgatgtaacccactcgtgcacccaactgatcttcagcatcttttactttcaccagcgtttctgggtgagcaaaaacaggaaggcaaaatgccgcaaaaaagggaataagggcgacacggaaatgttgaatactcatactcttcctttttcaatattattgaagcatttatcagggttattgtctcatgagcggatacatatttgaatgtatttagaaaaataaacaaataggggttccgcgcacatttccccgaaaagtgccacctgacgtc

SEQ ID NO: 41 - DNA, 6502 bp, Artificial Sequence
  Made in a laboratory from synthetic material
gacggatcgggagatctcccgatcccctatggtcgactctcagtacaatctgctctgatgccgcatagttaagccagtatctgctccctgcttgtgtgttggaggtcgctgagtagtgcgcgagcaaaatttaagctacaacaaggcaaggcttgaccgacaattgcatgaagaatctgcttagggttaggcgttttgcgctgcttcgcgagttggttcagctgctgcctgaggctggacgacctcgcggagttctaccggcagtgcaaatccgtcggcatccaggaaaccagcagcggctatccgcgcatccatgcccccgaactgcaggagtggggaggcacgatggccgctttggtcgaggcggatccggccattagccatattattcattggttatatagcataaatcaatattggctattggccattgcatacgttgtatccatatcataatatgtacatttatattggctcatgtccaacattaccgccatgttgacattgattattgactagttattaatagtaatcaattacggggtcattagttcatagcccatatatggagttccgcgttacataacttacggtaaatggcccgcctggctgaccgcccaacgacccccgcccattgacgtcaataatgacgtatgttcccatagtaacgccaatagggactttccattgacgtcaatgggtggagtatttacggtaaactgcccacttggcagtacatcaagtgtatcatatgccaagtacgccccctattgacgtcaatgacggtaaatggcccgcctggcattatgcccagtacatgaccttatgggactttcctacttggcagtacatctacgtattagtcatcgctattaccatggtgatgcggttttggcagtacatcaatgggcgtggatagcggtttgactcacggggatttccaagtctccaccccattgacgtcaatgggagtttgttttggcaccaaaatcaacgggactttccaaaatgtcgtaacaactccgccccattgacgcaaatgggcggtaggcatgtacggtgggaggtctatataagcagagctcgtttagtgaaccgtcagatcgcctggagacgccatccacgctgttttgacctccatagaagacaccgggaccgatccagcctccgcggccccaagcttgttaattcatatgtctagattagataaaagtaaagtgattaacagcgcattagagctgcttaatgaggtcggaatcgaaggtttaacaacccgtaaactcgcccagaagcttggtgtagagcagcctacactgtattggcatgtaaaaaataagcgggctttgctcgacgccttagccattgagatgttagataggcaccatactcacttttgccctttaaaaggggaaagctggcaagattttttacgcaataacgctaaaagttttagatgtgctttactaagtcatcgcaatggagcaaaagtacattcagatacacggcctacagaaaaacagtatgaaactctcgaaaatcaattagcctttttatgccaacaaggtttttcactagagaacgcgttatatgcactcagcgctgtggggcattttactttaggttgcgtattggaagatcaagagcatcaagtcgctaaagaagaaagggaaacacctactactgatagtatgccgccattattacgacaagctatcgaattatttgatcaccaaggtgcagagccagccttcttattcggccttgaattgatcatatgcggattagaaaaacaacttaaatgtgaaagtgggtccgcgtacagccgcgcgcgtacgaaaaacaattacgggtctaccatcgagggcctgctcgatctcccggacgacgacgcccccgaagaggcggggctggcggctccgcgcctgtcctttctccccgcgggacacacgcgcagactgtcgacggcccccccgaccgatgtcagcctgggggacgagctccacttagacggcgaggacgtggcgatggcgcatgccgacgcgctagacgatttcgatctggacatgttgggggacggggattccccgggtccgggatttaccccccacgactccgccccctacggcgctctggatatggccgacttcgagtttgagcagatgtttaccgatgcccttggaattgacgagtacggtgggtagggggcgcgaggatcaacatcgatatctgcggcctagctagcgcttaaggcctgttaaccggtcgtacgtctccggattcgaattcggatccgcggccgcatagataactgatccagtgtgctggaattaattcgctgtctgcgagggccagctgttggggtgagtactccctctcaaaagcgggcatgacttctgcgctaagattgtcagtttccaaaaacgaggaggatttgatattcacctggcccgcggtgatgcctttgagggtggccgcgtccatctggtcagaaaagacaatctttttgttgtcaagcttgaggtgtggcaggcttgagatctggccatacacttgagtgacaatgacatccactttgcctttctctccacaggtgtccactcccaggtccaactgcaggtcgagcatgcatctagggcggccaattccgcccctctccctcccccccccctaacgttactggccgaagccgcttggaataaggccggtgtgcgtttgtctatatgtgattttccaccatattgccgtcttttggcaatgtgagggcccggaaacctggccctgtcttcttgacgagcattcctaggggtctttcccctctcgccaaaggaatgcaaggtctgttgaatgtcgtgaaggaagcagttcctctggaagcttcttgaagacaaacaacgtctgtagcgaccctttgcaggcagcggaaccccccacctggcgacaggtgcctctgcggccaaaagccacgtgtataagatacacctgcaaaggcggcacaaccccagtgccacgttgtgagttggatagttgtggaaagagtcaaatggctctcctcaagcgtattcaacaaggggctgaaggatgcccagaaggtaccccattgtatgggatctgatctggggcctcggtgcacatgctttacatgtgtttagtcgaggttaaaaaaacgtctaggccccccgaaccacggggacgtggttttcctttgaaaaacacgatgataagcttgccacaacccacaaggagacgaccttccatgaccgagtacaagcccacggtgcgcctcgccacccgcgacgacgtcccccgggccgtacgcaccctcgccgccgcgttcgccgactaccccgccacgcgccacaccgtcgacccggaccgccacatcgagcgggtcaccgagctgcaagaactcttcctcacgcgcgtcgggctcgacatcggcaaggtgtgggtcgcggacgacggcgccgcggtggcggtctggaccacgccggagagcgtcgaagcgggggcggtgttcgccgagatcggcccgcgcatggccgagttgagcggttcccggctggccgcgcagcaacagatggaaggcctcctggcgccgcaccggcccaaggagcccgcgtggttcctggccaccgtcggcgtctcgcccgaccaccagggcaagggtctgggcagcgccgtcgtgctccccggagtggaggcggccgagcgcgccggggtgcccgccttcctggagacctccgcgccccgcaacctccccttctacgagcggctcggcttcaccgtcaccgccgacgtcgagtgcccgaaggaccgcgcgacctggtgcatgacccgcaagcccggtgcctgacgcccgccccacgacccgcagcgcccgaccgaaaggagcgcacgaccccatggctccgaccgaagccgacccgggcggccccgccgaccccgcacccgcccccgaggcccaccgactctagagctcgctgatcagcctcgactgtgccttctagttgccagccatctgttgtttgcccctcccccgtgccttccttgaccctggaaggtgccactcccactgtcctttcctaataaaatgaggaaattgcatcgcattgtctgagtaggtgtcattctattctggggggtggggtggggcaggacagcaagggggaggattgggaagacaatagcaggcatgctggggatgcggtgggctctatggcttctgaggcggaaagaaccagctggggctcgagtgcattctagttgtggtttgtccaaactcatcaatgtatcttatcatgtctgtataccgtcgacctctagctagagcttggcgtaatcatggtcatagctgtttcctgtgtgaaattgttatccgctcacaattccacacaacatacgagccggaagcataaagtgtaaagcctggggtgcctaatgagtgagctaactcacattaattgcgttgcgctcactgcccgctttccagtcgggaaacctgtcgtgccagctgcattaatgaatcggccaacgcgcggggagaggcggtttgcgtattgggcgctcttccgcttcctcgctcactgactcgctgcgctcggtcgttcggctgcggcgagcggtatcagctcactcaaaggcggtaatacggttatccacagaatcaggggataacgcaggaaagaacatgtgagcaaaaggccagcaaaaggccaggaaccgtaaaaaggccgcgttgctggcgtttttccataggctccgcccccctgacgagcatcacaaaaatcgacgctcaagtcagaggtggcgaaacccgacaggactataaagataccaggcgtttccccctggaagctccctcgtgcgctctcctgttccgaccctgccgcttaccggatacctgtccgcctttctcccttcgggaagcgtggcgctttctcaatgctcacgctgtaggtatctcagttcggtgtaggtcgttcgctccaagctgggctgtgtgcacgaaccccccgttcagcccgaccgctgcgccttatccggtaactatcgtcttgagtccaacccggtaagacacgacttatcgccactggcagcagccactggtaacaggattagcagagcgaggtatgtaggcggtgctacagagttcttgaagtggtggcctaactacggctacactagaaggacagtatttggtatctgcgctctgctgaagccagttaccttcggaaaaagagttggtagctcttgatccggcaaacaaaccaccgctggtagcggtggtttttttgtttgcaagcagcagattacgcgcagaaaaaaaggatctcaagaagatcctttgatcttttctacggggtctgacgctcagtggaacgaaaactcacgttaagggattttggtcatgagattatcaaaaaggatcttcacctagatccttttaaattaaaaatgaagttttaaatcaatctaaagtatatatgagtaaacttggtctgacagttaccaatgcttaatcagtgaggcacctatctcagcgatctgtctatttcgttcatccatagttgcctgactccccgtcgtgtagataactacgatacgggagggcttaccatctggccccagtgctgcaatgataccgcgagacccacgctcaccggctccagatttatcagcaataaaccagccagccggaagggccgagcgcagaagtggtcctgcaactttatccgcctccatccagtctattaattgttgccgggaagctagagtaagtagttcgccagttaatagtttgcgcaacgttgttgccattgctacaggcatcgtggtgtcacgctcgtcgtttggtatggcttcattcagctccggttcccaacgatcaaggcgagttacatgatcccccatgttgtgcaaaaaagcggttagctccttcggtcctccgatcgttgtcagaagtaagttggccgcagtgttatcactcatggttatggcagcactgcataattctcttactgtcatgccatccgtaagatgcttttctgtgactggtgagtactcaaccaagtcattctgagaatagtgtatgcggcgaccgagttgctcttgcccggcgtcaatacgggataataccgcgccacatagcagaactttaaaagtgctcatcattggaaaacgttcttcggggcgaaaactctcaaggatcttaccgctgttgagatccagttcgatgtaacccactcgtgcacccaactgatcttcagcatcttttactttcaccagcgtttctgggtgagcaaaaacaggaaggcaaaatgccgcaaaaaagggaataagggcgacacggaaatgttgaatactcatactcttcctttttcaatattattgaagcatttatcagggttattgtctcatgagcggatacatatttgaatgtatttagaaaaataaacaaataggggttccgcgcacatttccccgaaaagtgccacctgacgtc

SEQ ID NO: 42 - DNA, 8591 bp, Artificial Sequence
  Made in a laboratory from synthetic material
ctgcaggaattcggggccgcggaggctggatcggtcccggtgtcttctatggaggtcaaaacagcgtggatggcgtctccaggcgatctgacggttcactaaacgagctctgcttatataggtcgagtttaccactccctatcagtgatagagaaaagtgaaagtcgagtttaccactccctatcagtgatagagaaaagtgaaagtcgagtttaccactccctatcagtgatagagaaaagtgaaagtcgagtttaccactccctatcagtgatagagaaaagtgaaagtcgagtttaccactccctatcagtgatagagaaaagtgaaagtcgagtttaccactccctatcagtgatagagaaaagtgaaagtcgagtttaccactccctatcagtgatagagaaaagtgaaagtcgagctcggtacccgggtcgagtaggcgtgtacggtgggaggcctatataagcagagctcgtttagtgaaccgtcagatcgcctggagacgccatccacgctgttttgacctccatagaagacaccgggaccgatccagcctccgcggccccgaattcgagctcggtacccggggatcctctagtcagctgacgcgtgctagagtcgaggtcgagaattcggatccaccatgctagcgctaccggtcgccaccatggtgagcaagggcgaggagctgttcaccggggtggtgcccatcctggtcgagctggacggcgacgtaaacggccacaagttcagcgtgtccggcgagggcgagggcgatgccacctacggcaagctgaccctgaagttcatctgcaccaccggcaagctgcccgtgccctggcccaccctcgtgaccaccctgacctacggcgtgcagtgcttcagccgctaccccgaccacatgaagcagcacgacttcttcaagtccgccatgcccgaaggctacgtccaggagcgcaccatcttcttcaaggacgacggcaactacaagacccgcgccgaggtgaagttcgagggcgacaccctggtgaaccgcatcgagctgaagggcatcgacttcaaggaggacggcaacatcctggggcacaagctggagtacaactacaacagccacaacgtctatatcatggccgacaagcagaagaacggcatcaaggtgaacttcaagatccgccacaacatcgaggacggcagcgtgcagctcgccgaccactaccagcagaacacccccatcggcgacggccccgtgctgctgcccgacaaccactacctgagcacccagtccgccctgagcaaagaccccaacgagaagcgcgatcacatggtcctgctggagttcgtgaccgccgccgggatcactctcggcatggacgagctgtacaagtccggccggactcagatctcgagctcaagcttcgaattcatggctagcctgcagatggtaacagtgggtcataacatagccttaattcaaccaggcttctcacttatgaattttgatggccaagttttcttctttggccagaaaggctggcctaagagatcctgtcctactggagtctttcattttgatataaaacaaaatcatctcaaactgaagcctgcaatcttctctaaagattcctgctacctcccacctcttcgttatccagctacttgctcatacaaaggcagcatagactctgacaagcatcaatatatcattcacggagggaaaacaccaaacaatgagctttccgataagatttatatcatgtctgtcgcttgcaagaataacaaaaaagttactttccgttgcacagagaaagacttagtaggagatgtccctgaacccagatacggccattccattgacgtggtgtatagtcgagggaaaagcatgggtgttctctttggaggacgttcatacatgccttctacccagagaaccacagaaaaatggaatagtgtagctgactgcctaccccatgttttcttgatagattttgaatttgggtgtgctacatcatatattctcccagaacttcaggatgggctgtcttttcatgtttctattgccagaaacgataccgtttatattttgggaggacactcacttgccagtaatatacgccctgctaacttgtatagaataagagtggaccttcccctgggtaccccagcagtgaattgcacagtcttgccaggaggaatctctgtctccagtgcaatcctcactcaaacaaacaatgatgaatttgttattgtgggtggttatcagctggaaaatcagaaaaggatggtctgcagccttgtctctctaggggacaacacgattgaaatcagtgagatggagactcctgactggacctcagatattaagcatagcaaaatatggtttggaagcaacatgggaaacgggactattttccttggcataccaggagacaataagcaggctatgtcagaagcattctatttctatactttgagatgctctgaagaggatttgagtgaagatcagaaaattgtctccaacagtcagacatcaacagaagatcctggggactccactccctttgaagactcagaggaattttgtttcagtgctgaagcaaccagttttgatggtgacgatgaatttgacacctacaatgaagatgatgaagatgacgagtctgtaaccggctactggataacatgttgccctacttgtgatgttgacatcaatacctgggttccgttctattcaacggagctcaataaacccgccatgatctattgttctcatggggatgggcactgggtacatgcccagtgcatggatttggaagaacgcacactcatccacttgtcagaaggaagcaacaagtattattgcaatgaacatgtacagatagcaagagcattgcaaactcccaaaagaaacccccccttacaaaaacctccaatgaaatccctccacaaaaaaggctctgggaaagtcttgactcctgccaagaaatccttccttagaagactgtttgattaatttagcaaaagcccctcagactcaggtatattgctctctgaatctactttcaatcataaacattattttgatttttgttactgaaatctctatgttatgttttagttatgtgaattaagtgctgttgtgatttattgttaagtataactattctaatgtgtgttttttaacatcttatccaggaatgtcttaaatgagaaatgttatacagttttccattaaggatatcgaattcctgcagcccgggggatccactagtctagtctagcgcggcctcgacgatatctctagactgagaacttcagggtgagtttggggacccttgattgttctttctttttcgctattgaaaaattcatgttatatggagggggcaaagttttcagggtgttgtttagaatgggaagatgtcccttgtatcaccatggaccctcatgataattttgtttctttcactttctactctgttgacaaccattgtctcctcttattttcttttcattttctgtaacttttttcgttaaactttagcttgcatttgtaacgaatttttaaattcactttcgtttatttgtcagattgtaagtactttctctaatcacttttttttcaaggcaatcagggtaattatattgtacttcagcacagttttagagaacaattgttataattaaatgataaggtagaatatttctgcatataaattctggctggcgtggaaatattcttattggtagaaacaactacatcctggtaatcatcctgcctttctctttatggttacaatgatatacactgtttgagatgaggataaaatactctgagtccaaaccgggcccctctgctaaccatgttcatgccttcttctttttcctacagctcctgggcaacgtgctggttgttgtgctgtctcatcattttggcaaagaattcactcctcaggtgcaggctgcctatcagaaggtggtggctggtgtggccaatgccctggctcacaaataccactgagatctttttccctctgccaaaaattatggggacatcatgaagccccttgagcatctgacttctgggtaataaaggaaatttattttcattgcaatagtgtgtgggaattttttgtgtctctcactcggaaggacatatgggagggcaaatcatttaaaacatcagaatgagtatttggtttagagtttggcaacatatgccatatgctggctgccatgaacaaaggtggctataaagaggtcatcagtatatgaaacagccccctgctgtccattccttattccatagaaaagccttgacttgaggttagattttttttatattttgttttgtgttatttttttctttaacatccctaaaattttccttacatgttttactagccagatttttcctcctctcctgactactcccagtcatagctgtccctcttctcttatgaactcgactgcattaatgaatcggccaacgcgcggggagaggcggtttgcgtattgggcgctcttccgcttcctcgctcactgactcgctgcgctcggtcgttcggctgcggcgagcggtatcagctcactcaaaggcggtaatacggttatccacagaatcaggggataacgcaggaaagaacatgtgagcaaaaggccagcaaaaggccaggaaccgtaaaaaggccgcgttgctggcgtttttccataggctccgcccccctgacgagcatcacaaaaatcgacgctcaagtcagaggtggcgaaacccgacaggactataaagataccaggcgtttccccctggaagctccctcgtgcgctctcctgttccgaccctgccgcttaccggatacctgtccgcctttctcccttcgggaagcgtggcgctttctcaatgctcacgctgtaggtatctcagttcggtgtaggtcgttcgctccaagctgggctgtgtgcacgaaccccccgttcagcccgaccgctgcgccttatccggtaactatcgtcttgagtccaacccggtaagacacgacttatcgccactggcagcagccactggtaacaggattagcagagcgaggtatgtaggcggtgctacagagttcttgaagtggtggcctaactacggctacactagaaggacagtatttggtatctgcgctctgctgaagccagttaccttcggaaaaagagttggtagctcttgatccggcaaacaaaccaccgctggtagcggtggtttttttgtttgcaagcagcagattacgcgcagaaaaaaaggatctcaagaagatcctttgatcttttctacggggtctgacgctcagtggaacgaaaactcacgttaagggattttggtcatgagattatcaaaaaggatcttcacctagatccttttaaattaaaaatgaagttttaaatcaatctaaagtatatatgagtaaacttggtctgacagttaccaatgcttaatcagtgaggcacctatctcagcgatctgtctatttcgttcatccatagttgcctgactccccgtcgtgtagataactacgatacgggagggcttaccatctggccccagtgctgcaatgataccgcgagacccacgctcaccggctccagatttatcagcaataaaccagccagccggaagggccgagcgcagaagtggtcctgcaactttatccgcctccatccagtctattaattgttgccgggaagctagagtaagtagttcgccagttaatagtttgcgcaacgttgttgccattgctacaggcatcgtggtgtcacgctcgtcgtttggtatggcttcattcagctccggttcccaacgatcaaggcgagttacatgatcccccatgttgtgcaaaaaagcggttagctccttcggtcctccgatcgttgtcagaagtaagttggccgcagtgttatcactcatggttatggcagcactgcataattctcttactgtcatgccatccgtaagatgcttttctgtgactggtgagtactcaaccaagtcattctgagaatagtgtatgcggcgaccgagttgctcttgcccggcgtcaatacgggataataccgcgccacatagcagaactttaaaagtgctcatcattggaaaacgttcttcggggcgaaaactctcaaggatcttaccgctgttgagatccagttcgatgtaacccactcgtgcacccaactgatcttcagcatcttttactttcaccagcgtttctgggtgagcaaaaacaggaaggcaaaatgccgcaaaaaagggaataagggcgacacggaaatgttgaatactcatactcttcctttttcaatattattgaagcatttatcagggttattgtctcatgagcggatacatatttgaatgtatttagaaaaataaacaaataggggttccgcgcacatttccccgaaaagtgccacctgacgtctaagaaaccattattatcatgacattaacctataaaaataggcgtatcacgaggccctttcgtcttcactcgacgctggtcgagctgatacttcccgtccgccaggggacatgccggcgatgctgaaggtcgcgcgcattcccgatgaagaggccggttaccgcctgttgacctggtgggacgggcagggcgccgcccgagtcttgcctcggcggcgggcgctctgctcatggagcgcgcgtccggggaccttgcacagatagcgtggtccggccagacgacgaggcttgcaggatcataatcagccataccacatttgtagaggttttacttgctttaaaaaacctcccacacctccccctgaacctgaaacataaaatgaatgcaattgttgttgttaacttgtttattgcagcttataatggttacaaataaagcaatagcatcacaaatttcacaaataaagcatttttttcactgcattctagttgtggtttgtccaaactcatcaatgtatcttatcatgtctggatcctctagaactaggtcgacgcggccgttactagtggatctcgagttgacaacactttcctaggcatttctttcccacggttcaatataatccaatcccagatgcgcaaaaatttcttcttcactttctgctttgaggaatatcctcttggtcttgtcatataaagcatggttatccagaatcatcttccgctcatgtgtggcatagcgccggaggtctctctcaaactgccgggagccagtccatcccaacagggcaaaggcacgacgctcgtaggggcacagaactaaatccacacggatggccttccaggtctttccttcctgccaactggactggtcactgtccactctttgacgaggcaatttgaaaatcagaaagcacttttgaaaatgatccaaagcatcaaccttcctgctaggcaacctgagcttttcaaatgttgactccacaaggtcataatataaaagtaatcccttcttttcccataagttcatcactttctgtaaaagttgctcttcatcctctgttgatcctgggctggtaattaaaaaatctacatcatgccccatcttcttacccctccggaaccctcctgtcatggtgacgaaagcatccggaagaaatgcccagacagcctctttaaccagcacactgacggcctctgcttctgccctggtcacacagctgacaaggtcttcataatacagaaatcctgctttctgcattcgtgtaaatttcaggcttttgtccgaccttactttactcagagttctgaaacccatcctgaaccacttctcagaagtcttcagccccactccaaatacagaagtaaagagtttgaaggattgatatcgttcatcatttaacacagctttaacttcagaactttctccatcttcaataatctcctctatgatacccttcaccttggaccccaggcagggaattccttctgtgtccttcatactgatgattgtgaatggcagagatttcaatacagaagctgctctcataaatgtcacacaggagtcttcattttctctaaactcacagttttcagccagtatatcaaaggcatccgtgaatatctggttacagttgtttaaagtggttcttctctgacacgcatactgggagatcttttgtacagcaattggtggagtcttcggggggcctgggttggtgctatctgaatagtctcttctcacaacaagctggtgttttcctgtcatttccaccggtttccctgctcctatgcattcgatcagccaggagacatcgaggagctctggttgtgagctgacttgtactttctgtgcttgaagccactccagaacatccgaacccgagttgttctctgctacaatgtgggtgacagaatcactgagctcattttcaaccctgaaccctttcctgcgggccagctccatgaggaacgctctgcgggtggttcccattttcttctccaaaatgaagacgaccaaatcttgaaatttgatgtcttgaggagaggaggccatcaaggcacccgtctgccggggtctcttcttccgagggctcaagtgggacgctcgtggtggatccatggcggccgc

SEQ ID NO: 43 - DNA, 19 bp, Artificial Sequence
  Made in a laboratory from synthetic material
ggtcaccgtctcytcaggt

SEQ ID NO: 44 - DNA, 28 bp, Artificial Sequence
  Made in a laboratory from synthetic material
gatatcgataccagtagcacagcctctg

SEQ ID NO: 45 - DNA, 27 bp, Artificial Sequence
  Made in a laboratory from synthetic material
ctggaattctgcaggacactcgaatgg

SEQ ID NO: 46 - DNA, 29 bp, Artificial Sequence
  Made in a laboratory from synthetic material
tgcggatccacctgactctccgactgtcc

SEQ ID NO: 47 - DNA, 26 bp, Artificial Sequence
  Made in a laboratory from synthetic material
ctaactagttgggaccctctcagact

SEQ ID NO: 48 - DNA, 28 bp, Artificial Sequence
  Made in a laboratory from synthetic material
ccatctagacagagaccttctgtctccg

SEQ ID NO: 49 - DNA, 32 bp, Artificial Sequence
  Made in a laboratory from synthetic material
tgagcgggccgcggcctcaattccagacacat

SEQ ID NO: 50 - DNA, 25 bp, Artificial Sequence
  Made in a laboratory from synthetic material
atgaaacacctgtggttcttcctcc

SEQ ID NO: 51 - DNA, 26 bp, Artificial Sequence
  Made in a laboratory from synthetic material
cgggtaccaacctgcaatgctcagga

SEQ ID NO: 52 - DNA, 9238 bp, Artificial Sequence
  Made in a laboratory from synthetic material
  misc_feature (1)...(9238): n = A,T,C or G
catcatcaataatataccttattttggattgaagccaatatgataatgagggggtggagtttgtgacgtggcgcggggcgtgggaacggggcgggtgacgtagtagtgtggcggaagtgtgatgttgcaagtgtggcggaacacatgtaagcgacggatgtggcaaaagtgacgtttttggtgtgcgccggtgtacacaggaagtgacaattttcgcgcggttttaggcggatgttgtagtaaatttgggcgtaaccgagtaagatttggccattttcgcgggaaaactgaataagaggaagtgaaatctgaataattttgtgttactcatagcgcgtaannnntaatagtaatcaattacggggtcattagttcatagcccatatatggagttccgcgttacataacttacggtaaatggcccgcctggctgaccgcccaacgacccccgcccattgacgtcaataatgacgtatgttcccatagtaacgccaatagggactttccattgacgtcaatgggtggagtatttacggtaaactgcccacttggcagtacatcaagtgtatcatatgccaagtacgccccctattgacgtcaatgacggtaaatggcccgcctggcattatgcccagtacatgaccttatgggactttcctacttggcagtacatctacgtattagtcatcgctattaccatggtgatgcggttttggcagtacatcaatgggcgtggatagcggtttgactcacggggatttccaagtctccaccccattgacgtcaatgggagtttgttttggcaccaaaatcaacgggactttccaaaatgtcgtaacaactccgccccattgacgcaaatgggcggtaggcgtgtacggtgggaggtctatataagcagagctggtttagtgaaccgtcagatccgctagagatctggtaccgtcgacgcggccgctcgagcctaagcttctacgtaccatcagaaactatgtctctgcagatggtaacagtcagtaataacatagccttaattcagccaggcttctcactgatgaattttgatggacaagttttcttctttggacaaaaaggctggcccaaaagatcctgccccactggagttttccatctggatgtaaagcataaccatgtcaaactgaagcctacaattttctctaaggattcctgctacctccctcctcttcgctacccagccacttgcacattcaaaggcagcttggagtctgaaaagcatcaatacatcatccatggagggaaaacaccaaacaatgaggtttcagataagatttatgtcatgtctattgtttgcaagaacaacaaaaaggttacttttcgctgcacagagaaagacttggtaggagatgttcctgaagccagatatggtcattccattaatgtggtgtacagccgagggaaaagtatgggtgttctctttggaggacgctcatacatgccttctacccacagaaccacagaaaaatggaatagtgtagctgactgcctgccctgtgttttcctggtggattttgaatttgggtgtgctacatcatacattcttccagaacttcaggatgggctatcttttcatgtctctattgccaaaaatgacaccatctatattttaggaggacattcacttgccaataatatccggcctgccaacctgtacagaataagggttgatcttcccctgggtagcccagctgtgaattgcacagtcttgccaggaggaatctctgtctccagtgcaatcctgactcaaactaacaatgatgaatttgttattgttggtggctatcagcttgaaaatcaaaaaagaatgatctgcaacatcatctctttagaggacaacaagatagaaattcgtgagatggagaccccagattggaccccagacattaagcacagcaagatatggtttggaagcaacatgggaaatggaactgtttttcttggcataccaggagacaataaacaagttgtttcagaaggattctatttctatatgttgaaatgtgctgaagatgatactaatgaagagcagacaacattcacaaacagtcaaacatcaacagaagatccaggggattccactccctttgaagactctgaagaattttgtttcagtgcagaagcaaatagttttgatggtgatgatgaatttgacacctataatgaagatgatgaagaagatgagtctgagacaggctactggattacatgctgccctacttgtgatgtggatatcaacacttgggtaccattctattcaactgagctcaacaaacccgccatgatctactgctctcatggggatgggcactgggtccatgctcagtgcatggatctggcagaacgcacactcatccatctgtcagcaggaagcaacaagtattactgcaatgagcatgtggagatagcaagagctctacacactccccaaagagtcctacccttaaaaaagcctccaatgaaatccctccgtaaaaaaggttctggaaaaatcttgactcctgccaagaaatcctttcttagaaggttgtttgattagttttgcaaaagcctttcagattcaggtgtatggaatttttgaatctatttttaaaatcataacattgattttaaaaatacatttttgtttatttaaaatgcctatgttttcttttagttacatgaattaagggccagaaaaaagtgtttataatgcaatgataaataaagtcattctagaccctatacattttgaaaatattttacccaaatactcaatttactaatttattcttcactgaggaattatccgatccaccggatctagataactgatcataatcagccataccacatttgtagaggttttacttgctttaaaaaacctcccacacctccccctgaacctgaaacataaaatgaatgcaattgttgttgttaacttgtttattgcagcttataatggttacaaataaagcaatagcatcacaaatttcacaaataaagcatttttttcactgcattctagttgtggtttgtccaaactcatcaatgtatcttaacgcnnnntaagggtgggaaagaatatataaggtgggggtcttatgtagttttgtatctgttttgcagcagccgccgccgccatgagcaccaactcgtttgatggaagcattgtgagctcatatttgacaacgcgcatgcccccatgggccggggtgcgtcagaatgtgatgggctccagcattgatggtcgccccgtcctgcccgcaaactctactaccttgacctacgagaccgtgtctggaacgccgttggagactgcagcctccgccgccgcttcagccgctgcagccaccgcccgcgggattgtgactgactttgctttcctgagcccgcttgcaagcagtgcagcttcccgttcatccgcccgcgatgacaagttgacggctcttttggcacaattggattctttgacccgggaacttaatgtcgtttctcagcagctgttggatctgcgccagcaggtttctgccctgaaggcttcctcccctcccaatgcggtttaaaacataaataaaaaaccagactctgtttggatttggatcaagcaagtgtcttgctgtctttatttaggggttttgcgcgcgcggtaggcccgggaccagcggtctcggtcgttgagggtcctgtgtattttttccaggacgtggtaaaggtgactctggatgttcagatacatgggcataagcccgtctctggggtggaggtagcaccactgcagagcttcatgctgcggggtggtgttgtagatgatccagtcgtagcaggagcgctgggcgtggtgcctaaaaatgtctttcagtagcaagctgattgccaggggcaggcccttggtgtaagtgtttacaaagcggttaagctgggatgggtgcatacgtggggatatgagatgcatcttggactgtatttttaggttggctatgttcccagccatatccctccggggattcatgttgtgcagaaccaccagcacagtgtatccggtgcacttgggaaatttgtcatgtagcttagaaggaaatgcgtggaagaacttggagacgcccttgtgacctccaagattttccatgcattcgtccataatgatggcaatgggcccacgggcggcggcctgggcgaagatatttctgggatcactaacgtcatagttgtgttccaggatgagatcgtcataggccatttttacaaagcgcgggcggagggtgccagactgcggtataatggttccatccggcccaggggcgtagttaccctcacagatttgcatttcccacgctttgagttcagatggggggatcatgtctacctgcggggcgatgaagaaaacggtttccggggtaggggagatcagctgggaagaaagcaggttcctgagcagctgcgacttaccgcagccggtgggcccgtaaatcacacctattaccgggtgcaactggtagttaagagagctgcagctgccgtcatccctgagcaggggggccacttcgttaagcatgtccctgactcgcatgttttccctgaccaaatccgccagaaggcgctcgccgcccagcgatagcagttcttgcaaggaagcaaagtttttcaacggtttgagaccgtccgccgtaggcatgcttttgagcgtttgaccaagcagttccaggcggtcccacagctcggtcacctgctctacggcatctcgatccagcatatctcctcgtttcgcgggttggggcggctttcgctgtacggcagtagtcggtgctcgtccagacgggccagggtcatgtctttccacgggcgcagggtcctcgtcagcgtagtctgggtcacggtgaaggggtgcgctccgggctgcgcgctggccagggtgcgcttgaggctggtcctgctggtgctgaagcgctgccggtcttcgccctgcgcgtcggccaggtagcatttgaccatggtgtcatagtccagcccctccgcggcgtggcccttggcgcgcagcttgcccttggaggaggcgccgcacgaggggcagtgcagacttttgagggcgtagagcttgggcgcgagaaataccgattccggggagtaggcatccgcgccgcaggccccgcagacggtctcgcattccacgagccaggtgagctctggccgttcggggtcaaaaaccaggtttcccccatgctttttgatgcgtttcttacctctggtttccatgagccggtgtccacgctcggtgacgaaaaggctgtccgtgtccccgtatacagactnnngtttaaacgaattcnnnatataaaatgcaaggtgctgctcaaaaaatcaggcaaagcctcgcgcaaaaaagaaagcacatcgtagtcatgctcatgcagataaaggcaggtaagctccggaaccaccacagaaaaagacaccatttttctctcaaacatgtctgcgggtttctgcataaacacaaaataaaataacaaaaaaacatttaaacattagaagcctgtcttacaacaggaaaaacaacccttataagcataagacggactacggccatgccggcgtgaccgtaaaaaaactggtcaccgtgattaaaaagcaccaccgacagctcctcggtcatgtccggagtcataatgtaagactcggtaaacacatcaggttgattcatcggtcagtgctaaaaagcgaccgaaatagcccgggggaatacatacccgcaggcgtagagacaacattacagcccccataggaggtataacaaaattaataggagagaaaaacacataaacacctgaaaaaccctcctgcctaggcaaaatagcaccctcccgctccagaacaacatacagcgcttcacagcggcagcctaacagtcagccttaccagtaaaaaagaaaacctattaaaaaaacaccactcgacacggcaccagctcaatcagtcacagtgtaaaaaagggccaagtgcagagcgagtatatataggactaaaaaatgacgtaacggttaaagtccacaaaaaacacccagaaaaccgcacgcgaacctacgcccagaaacgaaagccaaaaaacccacaacttcctcaaatcgtcacttccgttttcccacgttacgtaacttcccattttaagaaaactacaattcccaacacatacaagttactccgccctaaaacctacgtcacccgccccgttcccacgccccgcgccacgtcacaaactccaccccctcattatcatattggcttcaatccaaaataaggtatattattgatgatgnnttaattaaggatccnnncggtgtgaaataccgcacagatgcgtaaggagaaaataccgcatcaggcgctcttccgcttcctcgctcactgactcgctgcgctcggtcgttcggctgcggcgagcggtatcagctcactcaaaggcggtaatacggttatccacagaatcaggggataacgcaggaaagaacatgtgagcaaaaggccagcaaaaggccaggaaccgtaaaaaggccgcgttgctggcgtttttccataggctccgcccccctgacgagcatcacaaaaatcgacgctcaagtcagaggtggcgaaacccgacaggactataaagataccaggcgtttccccctggaagctccctcgtgcgctctcctgttccgaccctgccgcttaccggatacctgtccgcctttctcccttcgggaagcgtggcgctttctcatagctcacgctgtaggtatctcagttcggtgtaggtcgttcgctccaagctgggctgtgtgcacgaaccccccgttcagcccgaccgctgcgccttatccggtaactatcgtcttgagtccaacccggtaagacacgacttatcgccactggcagcagccactggtaacaggattagcagagcgaggtatgtaggcggtgctacagagttcttgaagtggtggcctaactacggctacactagaaggacagtatttggtatctgcgctctgctgaagccagttaccttcggaaaaagagttggtagctcttgatccggcaaacaaaccaccgctggtagcggtggtttttttgtttgcaagcagcagattacgcgcagaaaaaaaggatctcaagaagatcctttgatcttttctacggggtctgacgctcagtggaacgaaaactcacgttaagggattttggtcatgagattatcaaaaaggatcttcacctagatccttttaaattaaaaatgaagttttaaatcaatctaaagtatatatgagtaaacttggtctgacagttaccaatgcttaatcagtgaggcacctatctcagcgatctgtctatttcgttcatccatagttgcctgactccccgtcgtgtagataactacgatacgggagggcttaccatctggccccagtgctgcaatgataccgcgagacccacgctcaccggctccagatttatcagcaataaaccagccagccggaagggccgagcgcagaagtggtcctgcaactttatccgcctccatccagtctattaattgttgccgggaagctagagtaagtagttcgccagttaatagtttgcgcaacgttgttgnnnnaaaaaggatcttcacctagatccttttcacgtagaaagccagtccgcagaaacggtgctgaccccggatgaatgtcagctactgggctatctggacaagggaaaacgcaagcgcaaagagaaagcaggtagcttgcagtgggcttacatggcgatagctagactgggcggttttatggacagcaagcgaaccggaattgccagctggggcgccctctggtaaggttgggaagccctgcaaagtaaactggatggctttctcgccgccaaggatctgatggcgcaggggatcaagctctgatcaagagacaggatgaggatcgtttcgcatgattgaacaagatggattgcacgcaggttctccggccgcttgggtggagaggctattcggctatgactgggcacaacagacaatcggctgctctgatgccgccgtgttccggctgtcagcgcaggggcgcccggttctttttgtcaagaccgacctgtccggtgccctgaatgaactgcaagacgaggcagcgcggctatcgtggctggccacgacgggcgttccttgcgcagctgtgctcgacgttgtcactgaagcgggaagggactggctgctattgggcgaagtgccggggcaggatctcctgtcatctcaccttgctcctgccgagaaagtatccatcatggctgatgcaatgcggcggctgcatacgcttgatccggctacctgcccattcgaccaccaagcgaaacatcgcatcgagcgagcacgtactcggatggaagccggtcttgtcgatcaggatgatctggacgaagagcatcaggggctcgcgccagccgaactgttcgccaggctcaaggcgagcatgcccgacggcgaggatctcgtcgtgacccatggcgatgcctgcttgccgaatatcatggtggaaaatggccgcttttctggattcatcgactgtggccggctgggtgtggcggaccgctatcaggacatagcgttggctacccgtgatattgctgaagagcttggcggcgaatgggctgaccgcttcctcgtgctttacggtatcgccgctcccgattcgcagcgcatcgccttctatcgccttcttgacgagttcttctgaattttgttaaaatttttgttaaatcagctcattttttaaccaataggccgaaatcggcaacatcccttataaatcaaaagaatagaccgcgatagggttgagtgttgttccagtttggaacaagagtccactattaaagaacgtggactccaacgtcaaagggcgaaaaaccgtctatcagggcgatggcccactacgtgaaccatcacccaaatcaagttttttgcggtcgaggtgccgtaaagctctaaatcggaaccctaaagggagcccccgatttagagcttgacggggaaagccggcgaacgtggcgagaaaggaagggaagaaagcgaaaggagcgggcgctagggcgctggcaagtgtagcggtcacgctgcgcgtaaccaccacacccgcgcgcttaatgcgccgctacagggcgcgtccattcgccattcaggatcgaattaattcttaattaa

SEQ ID NO: 53 - DNA, 10089 bp, Artificial Sequence
  Made in a laboratory from synthetic material
  misc_feature (1)...(10089): n = A,T,C or G
catcatcaataatataccttattttggattgaagccaatatgataatgagggggtggagtttgtgacgtggcgcggggcgtgggaacggggcgggtgacgtagtagtgtggcggaagtgtgatgttgcaagtgtggcggaacacatgtaagcgacggatgtggcaaaagtgacgtttttggtgtgcgccggtgtacacaggaagtgacaattttcgcgcggttttaggcggatgttgtagtaaatttgggcgtaaccgagtaagatttggccattttcgcgggaaaactgaataagaggaagtgaaatctgaataattttgtgttactcatagcgcgtaannnntaatagtaatcaattacggggtcattagttcatagcccatatatggagttccgcgttacataacttacggtaaatggcccgcctggctgaccgcccaacgacccccgcccattgacgtcaataatgacgtatgttcccatagtaacgccaatagggactttccattgacgtcaatgggtggagtatttacggtaaactgcccacttggcagtacatcaagtgtatcatatgccaagtacgccccctattgacgtcaatgacggtaaatggcccgcctggcattatgcccagtacatgaccttatgggactttcctacttggcagtacatctacgtattagtcatcgctattaccatggtgatgcggttttggcagtacatcaatgggcgtggatagcggtttgactcacggggatttccaagtctccaccccattgacgtcaatgggagtttgttttggcaccaaaatcaacgggactttccaaaatgtcgtaacaactccgccccattgacgcaaatgggcggtaggcgtgtacggtgggaggtctatataagcagagctggtttagtgaaccgtcagatccgctagagatctggtaccgtcgacgcggccgctctgagcctaagcttctagagtcgaggtcgagaattcggatccaccatgctagcgctaccggtcgccaccatggtgagcaagggcgaggagctgttcaccggggtggtgcccatcctggtcgagctggacggcgacgtaaacggccacaagttcagcgtgtccggcgagggcgagggcgatgccacctacggcaagctgaccctgaagttcatctgcaccaccggcaagctgcccgtgccctggcccaccctcgtgaccaccctgacctacggcgtgcagtgcttcagccgctaccccgaccacatgaagcagcacgacttcttcaagtccgccatgcccgaaggctacgtccaggagcgcaccatcttcttcaaggacgacggcaactacaagacccgcgccgaggtgaagttcgagggcgacaccctggtgaaccgcatcgagctgaagggcatcgacttcaaggaggacggcaacatcctggggcacaagctggagtacaactacaacagccacaacgtctatatcatggccgacaagcagaagaacggcatcaaggtgaacttcaagatccgccacaacatcgaggacggcagcgtgcagctcgccgaccactaccagcagaacacccccatcggcgacggccccgtgctgctgcccgacaaccactacctgagcacccagtccgccctgagcaaagaccccaacgagaagcgcgatcacatggtcctgctggagttcgtgaccgccgccgggatcactctcggcatggacgagctgtacaagtccggccggactcagatctcgagctcaagcttcgaattcatggctagcctgcagatggtaacagtgggtcataacatagccttaattcaaccaggcttctcacttatgaattttgatggccaagttttcttctttggccagaaaggctggcctaagagatcctgtcctactggagtctttcattttgatataaaacaaaatcatctcaaactgaagcctgcaatcttctctaaagattcctgctacctcccacctcttcgttatccagctacttgctcatacaaaggcagcatagactctgacaagcatcaatatatcattcacggagggaaaacaccaaacaatgagctttccgataagatttatatcatgtctgtcgcttgcaagaataacaaaaaagttactttccgttgcacagagaaagacttagtaggagatgtccctgaacccagatacggccattccattgacgtggtgtatagtcgagggaaaagcatgggtgttctctttggaggacgttcatacatgccttctacccagagaaccacagaaaaatggaatagtgtagctgactgcctaccccatgttttcttgatagattttgaatttgggtgtgctacatcatatattctcccagaacttcaggatgggctgtcttttcatgtttctattgccagaaacgataccgtttatattttgggaggacactcacttgccagtaatatacgccctgctaacttgtatagaataagagtggaccttcccctgggtaccccagcagtgaattgcacagtcttgccaggaggaatctctgtctccagtgcaatcctcactcaaacaaacaatgatgaatttgttattgtgggtggttatcagctggaaaatcagaaaaggatggtctgcagccttgtctctctaggggacaacacgattgaaatcagtgagatggagactcctgactggacctcagatattaagcatagcaaaatatggtttggaagcaacatgggaaacgggactattttccttggcataccaggagacaataagcaggctatgtcagaagcattctatttctatactttgagatgctctgaagaggatttgagtgaagatcagaaaattgtctccaacagtcagacatcaacagaagatcctggggactccactccctttgaagactcagaggaattttgtttcagtgctgaagcaaccagttttgatggtgacgatgaatttgacacctacaatgaagatgatgaagatgacgagtctgtaaccggctactggataacatgttgccctacttgtgatgttgacatcaatacctgggttccgttctattcaacggagctcaataaacccgccatgatctattgttctcatggggatgggcactgggtacatgcccagtgcatggatttggaagaacgcacactcatccacttgtcagaaggaagcaacaagtattattgcaatgaacatgtacagatagcaagagcattgcaaactcccaaaagaaacccccccttacaaaaacctccaatgaaatccctccacaaaaaaggctctgggaaagtcttgactcctgccaagaaatccttccttagaagactgtttgattaatttagcaaaagcccctcagactcaggtatattgctctctgaatctactttcaatcataaacattattttgatttttgttactgaaatctctatgttatgttttagttatgtgaattaagtgctgttgtgatttattgttaagtataactattctaatgtgtgttttttaacatcttatccaggaatgtcttaaatgagaaatgttatacagttttccattaaggatatcgaattcctgcagcccgggggatccactagtctagtctagataactgatcataatcagccataccacatttgtagaggttttacttgctttaaaaaacctcccacacctccccctgaacctgaaacataaaatgaatgcaattgttgttgttaacttgtttattgcagcttataatggttacaaataaagcaatagcatcacaaatttcacaaataaagcatttttttcactgcattctagttgtggtttgtccaaactcatcaatgtatcttaacgcnnnntaagggtgggaaagaatatataaggtgggggtcttatgtagttttgtatctgttttgcagcagccgccgccgccatgagcaccaactcgtttgatggaagcattgtgagctcatatttgacaacgcgcatgcccccatgggccggggtgcgtcagaatgtgatgggctccagcattgatggtcgccccgtcctgcccgcaaactctactaccttgacctacgagaccgtgtctggaacgccgttggagactgcagcctccgccgccgcttcagccgctgcagccaccgcccgcgggattgtgactgactttgctttcctgagcccgcttgcaagcagtgcagcttcccgttcatccgcccgcgatgacaagttgacggctcttttggcacaattggattctttgacccgggaacttaatgtcgtttctcagcagctgttggatctgcgccagcaggtttctgccctgaaggcttcctcccctcccaatgcggtttaaaacataaataaaaaaccagactctgtttggatttggatcaagcaagtgtcttgctgtctttatttaggggttttgcgcgcgcggtaggcccgggaccagcggtctcggtcgttgagggtcctgtgtattttttccaggacgtggtaaaggtgactctggatgttcagatacatgggcataagcccgtctctggggtggaggtagcaccactgcagagcttcatgctgcggggtggtgttgtagatgatccagtcgtagcaggagcgctgggcgtggtgcctaaaaatgtctttcagtagcaagctgattgccaggggcaggcccttggtgtaagtgtttacaaagcggttaagctgggatgggtgcatacgtggggatatgagatgcatcttggactgtatttttaggttggctatgttcccagccatatccctccggggattcatgttgtgcagaaccaccagcacagtgtatccggtgcacttgggaaatttgtcatgtagcttagaaggaaatgcgtggaagaacttggagacgcccttgtgacctccaagattttccatgcattcgtccataatgatggcaatgggcccacgggcggcggcctgggcgaagatatttctgggatcactaacgtcatagttgtgttccaggatgagatcgtcataggccatttttacaaagcgcgggcggagggtgccagactgcggtataatggttccatccggcccaggggcgtagttaccctcacagatttgcatttcccacgctttgagttcagatggggggatcatgtctacctgcggggcgatgaagaaaacggtttccggggtaggggagatcagctgggaagaaagcaggttcctgagcagctgcgacttaccgcagccggtgggcccgtaaatcacacctattaccgggtgcaactggtagttaagagagctgcagctgccgtcatccctgagcaggggggccacttcgttaagcatgtccctgactcgcatgttttccctgaccaaatccgccagaaggcgctcgccgcccagcgatagcagttcttgcaaggaagcaaagtttttcaacggtttgagaccgtccgccgtaggcatgcttttgagcgtttgaccaagcagttccaggcggtcccacagctcggtcacctgctctacggcatctcgatccagcatatctcctcgtttcgcgggttggggcggctttcgctgtacggcagtagtcggtgctcgtccagacgggccagggtcatgtctttccacgggcgcagggtcctcgtcagcgtagtctgggtcacggtgaaggggtgcgctccgggctgcgcgctggccagggtgcgcttgaggctggtcctgctggtgctgaagcgctgccggtcttcgccctgcgcgtcggccaggtagcatttgaccatggtgtcatagtccagcccctccgcggcgtggcccttggcgcgcagcttgcccttggaggaggcgccgcacgaggggcagtgcagacttttgagggcgtagagcttgggcgcgagaaataccgattccggggagtaggcatccgcgccgcaggccccgcagacggtctcgcattccacgagccaggtgagctctggccgttcggggtcaaaaaccaggtttcccccatgctttttgatgcgtttcttacctctggtttccatgagccggtgtccacgctcggtgacgaaaaggctgtccgtgtccccgtatacagacttgagagggagtttaaacgaattcaatagcttgttgcatgggcggcgatataaaatgcaaggtgctgctcaaaaaatcaggcaaagcctcgcgcaaaaaagaaagcacatcgtagtcatgctcatgcagataaaggcaggtaagctccggaaccaccacagaaaaagacaccatttttctctcaaacatgtctgcgggtttctgcataaacacaaaataaaataacaaaaaaacatttaaacattagaagcctgtcttacaacaggaaaaacaacccttataagcataagacggactacggccatgccggcgtgaccgtaaaaaaactggtcaccgtgattaaaaagcaccaccgacagctcctcggtcatgtccggagtcataatgtaagactcggtaaacacatcaggttgattcatcggtcagtgctaaaaagcgaccgaaatagcccgggggaatacatacccgcaggcgtagagacaacattacagcccccataggaggtataacaaaattaataggagagaaaaacacataaacacctgaaaaaccctcctgcctaggcaaaatagcaccctcccgctccagaacaacatacagcgcttcacagcggcagcctaacagtcagccttaccagtaaaaaagaaaacctattaaaaaaacaccactcgacacggcaccagctcaatcagtcacagtgtaaaaaagggccaagtgcagagcgagtatatataggactaaaaaatgacgtaacggttaaagtccacaaaaaacacccagaaaaccgcacgcgaacctacgcccagaaacgaaagccaaaaaacccacaacttcctcaaatcgtcacttccgttttcccacgttacgtaacttcccattttaagaaaactacaattcccaacacatacaagttactccgccctaaaacctacgtcacccgccccgttcccacgccccgcgccacgtcacaaactccaccccctcattatcatattggcttcaatccaaaataaggtatattattgatgatgttaattaacatgcatggatccatatgcggtgtgaaataccgcacagatgcgtaaggagaaaataccgcatcaggcgctcttccgcttcctcgctcactgactcgctgcgctcggtcgttcggctgcggcgagcggtatcagctcactcaaaggcggtaatacggttatccacagaatcaggggataacgcaggaaagaacatgtgagcaaaaggccagcaaaaggccaggaaccgtaaaaaggccgcgttgctggcgtttttccataggctccgcccccctgacgagcatcacaaaaatcgacgctcaagtcagaggtggcgaaacccgacaggactataaagataccaggcgtttccccctggaagctccctcgtgcgctctcctgttccgaccctgccgcttaccggatacctgtccgcctttctcccttcgggaagcgtggcgctttctcatagctcacgctgtaggtatctcagttcggtgtaggtcgttcgctccaagctgggctgtgtgcacgaaccccccgttcagcccgaccgctgcgccttatccggtaactatcgtcttgagtccaacccggtaagacacgacttatcgccactggcagcagccactggtaacaggattagcagagcgaggtatgtaggcggtgctacagagttcttgaagtggtggcctaactacggctacactagaaggacagtatttggtatctgcgctctgctgaagccagttaccttcggaaaaagagttggtagctcttgatccggcaaacaaaccaccgctggtagcggtggtttttttgtttgcaagcagcagattacgcgcagaaaaaaaggatctcaagaagatcctttgatcttttctacggggtctgacgctcagtggaacgaaaactcacgttaagggattttggtcatgagattatcaaaaaggatcttcacctagatccttttaaattaaaaatgaagttttaaatcaatctaaagtatatatgagtaaacttggtctgacagttaccaatgcttaatcagtgaggcacctatctcagcgatctgtctatttcgttcatccatagttgcctgactccccgtcgtgtagataactacgatacgggagggcttaccatctggccccagtgctgcaatgataccgcgagacccacgctcaccggctccagatttatcagcaataaaccagccagccggaagggccgagcgcagaagtggtcctgcaactttatccgcctccatccagtctattaattgttgccgggaagctagagtaagtagttcgccagttaatagtttgcgcaacgttgttgccattgctgcagccatgagattatcaaaaaggatcttcacctagatccttttcacgtagaaagccagtccgcagaaacggtgctgaccccggatgaatgtcagctactgggctatctggacaagggaaaacgcaagcgcaaagagaaagcaggtagcttgcagtgggcttacatggcgatagctagactgggcggttttatggacagcaagcgaaccggaattgccagctggggcgccctctggtaaggttgggaagccctgcaaagtaaactggatggctttcttgccgccaaggatctgatggcgcaggggatcaagctctgatcaagagacaggatgaggatcgtttcgcatgattgaacaagatggattgcacgcaggttctccggccgcttgggtggagaggctattcggctatgactgggcacaacagacaatcggctgctctgatgccgccgtgttccggctgtcagcgcaggggcgcccggttctttttgtcaagaccgacctgtccggtgccctgaatgaactgcaagacgaggcagcgcggctatcgtggctggccacgacgggcgttccttgcgcagctgtgctcgacgttgtcactgaagcgggaagggactggctgctattgggcgaagtgccggggcaggatctcctgtcatctcaccttgctcctgccgagaaagtatccatcatggctgatgcaatgcggcggctgcatacgcttgatccggctacctgcccattcgaccaccaagcgaaacatcgcatcgagcgagcacgtactcggatggaagccggtcttgtcgatcaggatgatctggacgaagagcatcaggggctcgcgccagccgaactgttcgccaggctcaaggcgagcatgcccgacggcgaggatctcgtcgtgacccatggcgatgcctgcttgccgaatatcatggtggaaaatggccgcttttctggattcatcgactgtggccggctgggtgtggcggaccgctatcaggacatagcgttggctacccgtgatattgctgaagagcttggcggcgaatgggctgaccgcttcctcgtgctttacggtatcgccgctcccgattcgcagcgcatcgccttctatcgccttcttgacgagttcttctgaattttgttaaaatttttgttaaatcagctcattttttaaccaataggccgaaatcggcaacatcccttataaatcaaaagaatagaccgcgatagggttgagtgttgttccagtttggaacaagagtccactattaaagaacgtggactccaacgtcaaagggcgaaaaaccgtctatcagggcgatggcccactacgtgaaccatcacccaaatcaagttttttgcggtcgaggtgccgtaaagctctaaatcggaaccctaaagggagcccccgatttagagcttgacggggaaagccggcgaacgtggcgagaaaggaagggaagaaagcgaaaggagcgggcgctagggcgctggcaagtgtagcggtcacgctgcgcgtaaccaccacacccgcgcgcttaatgcgccgctacagggcgcgtccattcgccattcaggatcgaattaattcttaattaa

SEQ ID NO: 54 - DNA, 37399 bp, Artificial Sequence
  Made in a laboratory from synthetic material
  misc_feature (1)...(37399): n = A,T,C or G
ttaattaacatgcatggatcctcgtctcgacgatgcccttgagagccttcaacccagtcagctccttccggtgggcgcggggcatgactatcgtcgccgcacttatgactgtcttctttatcatgcaactcgtaggacaggtgccggcagcgctctgggtcattttcggcgaggaccgctttcgctggagcgcgacgatgatcggcctgtcgcttgcggtattcggaatcttgcacgccctcgctcaagccttcgtcactggtcccgccaccaaacgtttcggcgagaagcaggccattatcgccggcatggcggccgacgcgctgggctacgtcttgctggcgttcgcgacgcgaggctggatggccttccccattatgattcttctcgcttccggcggcatcgggatgcccgcgttgcaggccatgctgtccaggcaggtagatgacgaccatcagggacagcttcaaggatcgctcgcggctcttaccagcctaacttcgatcactggaccgctgatcgtcacggcgatttatgccgcctcggcgagcacatggaacgggttggcatggattgtaggcgccgccctataccttgtctgcctccccgcgttgcgtcgcggtgcatggagccgggccacctcgacctgaatggaagccggcggcacctcgctaacggattcaccactccaagaattggagccaatcaattcttgcggagaactgtgaatgcgcaaaccaacccttggcagaacatatccatcgcgtccgccatctccagcagccgcacgcggcgcatctcgggcagcgttgggtcctggccacgggtgcgcatgatcgtgctcctgtcgttgaggacccggctaggctggcggggttgccttactggttagcagaatgaatcaccgatacgcgagcgaacgtgaagcgactgctgctgcaaaacgtctgcgacctgagcaacaacatgaatggtcttcggtttccgtgtttcgtaaagtctggaaacgcggaagtcagcgccctgcaccattatgttccggatctgcatcgcaggatgctgctggctaccctgtggaacacctacatctgtattaacgaagcgctggcattgaccctgagtgatttttctctggtcccgccgcatccataccgccagttgtttaccctcacaacgttccagtaaccgggcatgttcatcatcagtaacccgtatcgtgagcatcctctctcgtttcatcggtatcattacccccatgaacagaaattcccccttacacggaggcatcaagtgaccaaacaggaaaaaaccgcccttaacatggcccgctttatcagaagccagacattaacgcttctggagaaactcaacgagctggacgcggatgaacaggcagacatctgtgaatcgcttcacgaccacgctgatgagctttaccgcagctgcctcgcgcgtttcggtgatgacggtgaaaacctctgacacatgcagctcccggagacggtcacagcttgtctgtaagcggatgccgggagcagacaagcccgtcagggcgcgtcagcgggtgttggcgggtgtcggggcgcagccatgacccagtcacgtagcgatagcggagtgtatactggcttaactatgcggcatcagagcagattgtactgagagtgcaccatatgcggtgtgaaataccgcacagatgcgtaaggagaaaataccgcatcaggcgctcttccgcttcctcgctcactgactcgctgcgctcggtcgttcggctgcggcgagcggtatcagctcactcaaaggcggtaatacggttatccacagaatcaggggataacgcaggaaagaacatgtgagcaaaaggccagcaaaaggccaggaaccgtaaaaaggccgcgttgctggcgtttttccataggctccgcccccctgacgagcatcacaaaaatcgacgctcaagtcagaggtggcgaaacccgacaggactataaagataccaggcgtttccccctggaagctccctcgtgcgctctcctgttccgaccctgccgcttaccggatacctgtccgcctttctcccttcgggaagcgtggcgctttctcaatgctcacgctgtaggtatctcagttcggtgtaggtcgttcgctccaagctgggctgtgtgcacgaaccccccgttcagcccgaccgctgcgccttatccggtaactatcgtcttgagtccaacccggtaagacacgacttatcgccactggcagcagccactggtaacaggattagcagagcgaggtatgtaggcggtgctacagagttcttgaagtggtggcctaactacggctacactagaaggacagtatttggtatctgcgctctgctgaagccagttaccttcggaaaaagagttggtagctcttgatccggcaaacaaaccaccgctggtagcggtggtttttttgtttgcaagcagcagattacgcgcagaaaaaaaggatctcaagaagatcctttgatcttttctacggggtctgacgctcagtggaacgaaaactcacgttaagggattttggtcatgagattatcaaaaaggatcttcacctagatccttttaaattaaaaatgaagttttaaatcaatctaaagtatatatgagtaaacttggtctgacagttaccaatgcttaatcagtgaggcacctatctcagcgatctgtctatttcgttcatccatagttgcctgactccccgtcgtgtagataactacgatacgggagggcttaccatctggccccagtgctgcaatgataccgcgagacccacgctcaccggctccagatttatcagcaataaaccagccagccggaagggccgagcgcagaagtggtcctgcaactttatccgcctccatccagtctattaattgttgccgggaagctagagtaagtagttcgccagttaatagtttgcgcaacgttgttgnnnnaaaaaggatcttcacctagatccttttcacgtagaaagccagtccgcagaaacggtgctgaccccggatgaatgtcagctactgggctatctggacaagggaaaacgcaagcgcaaagagaaagcaggtagcttgcagtgggcttacatggcgatagctagactgggcggttttatggacagcaagcgaaccggaattgccagctggggcgccctctggtaaggttgggaagccctgcaaagtaaactggatggctttctcgccgccaaggatctgatggcgcaggggatcaagctctgatcaagagacaggatgaggatcgtttcgcatgattgaacaagatggattgcacgcaggttctccggccgcttgggtggagaggctattcggctatgactgggcacaacagacaatcggctgctctgatgccgccgtgttccggctgtcagcgcaggggcgcccggttctttttgtcaagaccgacctgtccggtgccctgaatgaactgcaagacgaggcagcgcggctatcgtggctggccacgacgggcgttccttgcgcagctgtgctcgacgttgtcactgaagcgggaagggactggctgctattgggcgaagtgccggggcaggatctcctgtcatctcaccttgctcctgccgagaaagtatccatcatggctgatgcaatgcggcggctgcatacgcttgatccggctacctgcccattcgaccaccaagcgaaacatcgcatcgagcgagcacgtactcggatggaagccggtcttgtcgatcaggatgatctggacgaagagcatcaggggctcgcgccagccgaactgttcgccaggctcaaggcgagcatgcccgacggcgaggatctcgtcgtgacccatggcgatgcctgcttgccgaatatcatggtggaaaatggccgcttttctggattcatcgactgtggccggctgggtgtggcggaccgctatcaggacatagcgttggctacccgtgatattgctgaagagcttggcggcgaatgggctgaccgcttcctcgtgctttacggtatcgccgctcccgattcgcagcgcatcgccttctatcgccttcttgacgagttcttctgaattttgttaaaatttttgttaaatcagctcattttttaaccaataggccgaaatcggcaacatcccttataaatcaaaagaatagaccgcgatagggttgagtgttgttccagtttggaacaagagtccactattaaagaacgtggactccaacgtcaaagggcgaaaaaccgtctatcagggcgatggcccactacgtgaaccatcacccaaatcaagttttttgcggtcgaggtgccgtaaagctctaaatcggaaccctaaagggagcccccgatttagagcttgacggggaaagccggcgaacgtggcgagaaaggaagggaagaaagcgaaaggagcgggcgctagggcgctggcaagtgtagcggtcacgctgcgcgtaaccaccacacccgcgcgcttaatgcgccgctacagggcgcgtccattcgccattcaggatcgaattaattcttaattaacatcatcaataatataccttattttggattgaagccaatatgataatgagggggtggagtttgtgacgtggcgcggggcgtgggaacggggcgggtgacgtagtagtgtggcggaagtgtgatgttgcaagtgtggcggaacacatgtaagcgacggatgtggcaaaagtgacgtttttggtgtgcgccggtgtacacaggaagtgacaattttcgcgcggttttaggcggatgttgtagtaaatttgggcgtaaccgagtaagatttggccattttcgcgggaaaactgaataagaggaagtgaaatctgaataattttgtgttactcatagcgcgtaannnntaatagtaatcaattacggggtcattagttcatagcccatatatggagttccgcgttacataacttacggtaaatggcccgcctggctgaccgcccaacgacccccgcccattgacgtcaataatgacgtatgttcccatagtaacgccaatagggactttccattgacgtcaatgggtggagtatttacggtaaactgcccacttggcagtacatcaagtgtatcatatgccaagtacgccccctattgacgtcaatgacggtaaatggcccgcctggcattatgcccagtacatgaccttatgggactttcctacttggcagtacatctacgtattagtcatcgctattaccatggtgatgcggttttggcagtacatcaatgggcgtggatagcggtttgactcacggggatttccaagtctccaccccattgacgtcaatgggagtttgttttggcaccaaaatcaacgggactttccaaaatgtcgtaacaactccgccccattgacgcaaatgggcggtaggcgtgtacggtgggaggtctatataagcagagctggtttagtgaaccgtcagatccgctagagatctggtaccgtcgacgcggccgctcgagcctaagcttctacgtaccatcagaaactatgtctctgcagatggtaacagtcagtaataacatagccttaattcagccaggcttctcactgatgaattttgatggacaagttttcttctttggacaaaaaggctggcccaaaagatcctgccccactggagttttccatctggatgtaaagcataaccatgtcaaactgaagcctacaattttctctaaggattcctgctacctccctcctcttcgctacccagccacttgcacattcaaaggcagcttggagtctgaaaagcatcaatacatcatccatggagggaaaacaccaaacaatgaggtttcagataagatttatgtcatgtctattgtttgcaagaacaacaaaaaggttacttttcgctgcacagagaaagacttggtaggagatgttcctgaagccagatatggtcattccattaatgtggtgtacagccgagggaaaagtatgggtgttctctttggaggacgctcatacatgccttctacccacagaaccacagaaaaatggaatagtgtagctgactgcctgccctgtgttttcctggtggattttgaatttgggtgtgctacatcatacattcttccagaacttcaggatgggctatcttttcatgtctctattgccaaaaatgacaccatctatattttaggaggacattcacttgccaataatatccggcctgccaacctgtacagaataagggttgatcttcccctgggtagcccagctgtgaattgcacagtcttgccaggaggaatctctgtctccagtgcaatcctgactcaaactaacaatgatgaatttgttattgttggtggctatcagcttgaaaatcaaaaaagaatgatctgcaacatcatctctttagaggacaacaagatagaaattcgtgagatggagaccccagattggaccccagacattaagcacagcaagatatggtttggaagcaacatgggaaatggaactgtttttcttggcataccaggagacaataaacaagttgtttcagaaggattctatttctatatgttgaaatgtgctgaagatgatactaatgaagagcagacaacattcacaaacagtcaaacatcaacagaagatccaggggattccactccctttgaagactctgaagaattttgtttcagtgcagaagcaaatagttttgatggtgatgatgaatttgacacctataatgaagatgatgaagaagatgagtctgagacaggctactggattacatgctgccctacttgtgatgtggatatcaacacttgggtaccattctattcaactgagctcaacaaacccgccatgatctactgctctcatggggatgggcactgggtccatgctcagtgcatggatctggcagaacgcacactcatccatctgtcagcaggaagcaacaagtattactgcaatgagcatgtggagatagcaagagctctacacactccccaaagagtcctacccttaaaaaagcctccaatgaaatccctccgtaaaaaaggttctggaaaaatcttgactcctgccaagaaatcctttcttagaaggttgtttgattagttttgcaaaagcctttcagattcaggtgtatggaatttttgaatctatttttaaaatcataacattgattttaaaaatacatttttgtttatttaaaatgcctatgttttcttttagttacatgaattaagggccagaaaaaagtgtttataatgcaatgataaataaagtcattctagaccctatacattttgaaaatattttacccaaatactcaatttactaatttattcttcactgaggaattatccgatccaccggatctagataactgatcataatcagccataccacatttgtagaggttttacttgctttaaaaaacctcccacacctccccctgaacctgaaacataaaatgaatgcaattgttgttgttaacttgtttattgcagcttataatggttacaaataaagcaatagcatcacaaatttcacaaataaagcatttttttcactgcattctagttgtggtttgtccaaactcatcaatgtatcttataagggtgggaaagaatatataaggtgggggtcttatgtagttttgtatctgttttgcagcagccgccgccgccatgagcaccaactcgtttgatggaagcattgtgagctcatatttgacaacgcgcatgcccccatgggccggggtgcgtcagaatgtgatgggctccagcattgatggtcgccccgtcctgcccgcaaactctactaccttgacctacgagaccgtgtctggaacgccgttggagactgcagcctccgccgccgcttcagccgctgcagccaccgcccgcgggattgtgactgactttgctttcctgagcccgcttgcaagcagtgcagcttcccgttcatccgcccgcgatgacaagttgacggctcttttggcacaattggattctttgacccgggaacttaatgtcgtttctcagcagctgttggatctgcgccagcaggtttctgccctgaaggcttcctcccctcccaatgcggtttaaaacataaataaaaaaccagactctgtttggatttggatcaagcaagtgtcttgctgtctttatttaggggttttgcgcgcgcggtaggcccgggaccagcggtctcggtcgttgagggtcctgtgtattttttccaggacgtggtaaaggtgactctggatgttcagatacatgggcataagcccgtctctggggtggaggtagcaccactgcagagcttcatgctgcggggtggtgttgtagatgatccagtcgtagcaggagcgctgggcgtggtgcctaaaaatgtctttcagtagcaagctgattgccaggggcaggcccttggtgtaagtgtttacaaagcggttaagctgggatgggtgcatacgtggggatatgagatgcatcttggactgtatttttaggttggctatgttcccagccatatccctccggggattcatgttgtgcagaaccaccagcacagtgtatccggtgcacttgggaaatttgtcatgtagcttagaaggaaatgcgtggaagaacttggagacgcccttgtgacctccaagattttccatgcattcgtccataatgatggcaatgggcccacgggcggcggcctgggcgaagatatttctgggatcactaacgtcatagttgtgttccaggatgagatcgtcataggccatttttacaaagcgcgggcggagggtgccagactgcggtataatggttccatccggcccaggggcgtagttaccctcacagatttgcatttcccacgctttgagttcagatggggggatcatgtctacctgcggggcgatgaagaaaacggtttccggggtaggggagatcagctgggaagaaagcaggttcctgagcagctgcgacttaccgcagccggtgggcccgtaaatcacacctattaccgggtgcaactggtagttaagagagctgcagctgccgtcatccctgagcaggggggccacttcgttaagcatgtccctgactcgcatgttttccctgaccaaatccgccagaaggcgctcgccgcccagcgatagcagttcttgcaaggaagcaaagtttttcaacggtttgagaccgtccgccgtaggcatgcttttgagcgtttgaccaagcagttccaggcggtcccacagctcggtcacctgctctacggcatctcgatccagcatatctcctcgtttcgcgggttggggcggctttcgctgtacggcagtagtcggtgctcgtccagacgggccagggtcatgtctttccacgggcgcagggtcctcgtcagcgtagtctgggtcacggtgaaggggtgcgctccgggctgcgcgctggccagggtgcgcttgaggctggtcctgctggtgctgaagcgctgccggtcttcgccctgcgcgtcggccaggtagcatttgaccatggtgtcatagtccagcccctccgcggcgtggcccttggcgcgcagcttgcccttggaggaggcgccgcacgaggggcagtgcagacttttgagggcgtagagcttgggcgcgagaaataccgattccggggagtaggcatccgcgccgcaggccccgcagacggtctcgcattccacgagccaggtgagctctggccgttcggggtcaaaaaccaggtttcccccatgctttttgatgcgtttcttacctctggtttccatgagccggtgtccacgctcggtgacgaaaaggctgtccgtgtccccgtatacagacttgagaggcctgtcctcgagcggtgttccgcggtcctcctcgtatagaaactcggaccactctgagacaaaggctcgcgtccaggccagcacgaaggaggctaagtgggaggggtagcggtcgttgtccactagggggtccactcgctccagggtgtgaagacacatgtcgccctcttcggcatcaaggaaggtgattggtttgtaggtgtaggccacgtgaccgggtgttcctgaaggggggctataaaagggggtgggggcgcgttcgtcctcactctcttccgcatcgctgtctgcgagggccagctgttggggtgagtactccctctgaaaagcgggcatgacttctgcgctaagattgtcagtttccaaaaacgaggaggatttgatattcacctggcccgcggtgatgcctttgagggtggccgcatccatctggtcagaaaagacaatctttttgttgtcaagcttggtggcaaacgacccgtagagggcgttggacagcaacttggcgatggagcgcagggtttggtttttgtcgcgatcggcgcgctccttggccgcgatgtttagctgcacgtattcgcgcgcaacgcaccgccattcgggaaagacggtggtgcgctcgtcgggcaccaggtgcacgcgccaaccgcggttgtgcagggtgacaaggtcaacgctggtggctacctctccgcgtaggcgctcgttggtccagcagaggcggccgcccttgcgcgagcagaatggcggtagggggtctagctgcgtctcgtccggggggtctgcgtccacggtaaagaccccgggcagcaggcgcgcgtcgaagtagtctatcttgcatccttgcaagtctagcgcctgctgccatgcgcgggcggcaagcgcgcgctcgtatgggttgagtgggggaccccatggcatggggtgggtgagcgcggaggcgtacatgccgcaaatgtcgtaaacgtagaggggctctctgagtattccaagatatgtagggtagcatcttccaccgcggatgctggcgcgcacgtaatcgtatagttcgtgcgagggagcgaggaggtcgggaccgaggttgctacgggcgggctgctctgctcggaagactatctgcctgaagatggcatgtgagttggatgatatggttggacgctggaagacgttgaagctggcgtctgtgagacctaccgcgtcacgcacgaaggaggcgtaggagtcgcgcagcttgttgaccagctcggcggtgacctgcacgtctagggcgcagtagtccagggtttccttgatgatgtcatacttatcctgtcccttttttttccacagctcgcggttgaggacaaactcttcgcggtctttccagtactcttggatcggaaacccgtcggcctccgaacggtaagagcctagcatgtagaactggttgacggcctggtaggcgcagcatcccttttctacgggtagcgcgtatgcctgcgcggccttccggagcgaggtgtgggtgagcgcaaaggtgtccctgaccatgactttgaggtactggtatttgaagtcagtgtcgtcgcatccgccctgctcccagagcaaaaagtccgtgcgctttttggaacgcggatttggcagggcgaaggtgacatcgttgaagagtatctttcccgcgcgaggcataaagttgcgtgtgatgcggaagggtcccggcacctcggaacggttgttaattacctgggcggcgagcacgatctcgtcaaagccgttgatgttgtggcccacaatgtaaagttccaagaagcgcgggatgcccttgatggaaggcaattttttaagttcctcgtaggtgagctcttcaggggagctgagcccgtgctctgaaagggcccagtctgcaagatgagggttggaagcgacgaatgagctccacaggtcacgggccattagcatttgcaggtggtcgcgaaaggtcctaaactggcgacctatggccattttttctggggtgatgcagtagaaggtaagcgggtcttgttcccagcggtcccatccaaggttcgcggctaggtctcgcgcggcagtcactagaggctcatctccgccgaacttcatgaccagcatgaagggcacgagctgcttcccaaaggcccccatccaagtataggtctctacatcgtaggtgacaaagagacgctcggtgcgaggatgcgagccgatcgggaagaactggatctcccgccaccaattggaggagtggctattgatgtggtgaaagtagaagtccctgcgacgggccgaacactcgtgctggcttttgtaaaaacgtgcgcagtactggcagcggtgcacgggctgtacatcctgcacgaggttgacctgacgaccgcgcacaaggaagcagagtgggaatttgagcccctcgcctggcgggtttggctggtggtcttctacttcggctgcttgtccttgaccgtctggctgctcgaggggagttacggtggatcggaccaccacgccgcgcgagcccaaagtccagatgtccgcgcgcggcggtcggagcttgatgacaacatcgcgcagatgggagctgtccatggtctggagctcccgcggcgtcaggtcaggcgggagctcctgcaggtttacctcgcatagacgggtcagggcgcgggctagatccaggtgatacctaatttccaggggctggttggtggcggcgtcgatggcttgcaagaggccgcatccccgcggcgcgactacggtaccgcgcggcgggcggtgggccgcgggggtgtccttggatgatgcatctaaaagcggtgacgcgggcgagcccccggaggtagggggggctccggacccgccgggagagggggcaggggcacgtcggcgccgcgcgcgggcaggagctggtgctgcgcgcgtaggttgctggcgaacgcgacgacgcggcggttgatctcctgaatctggcgcctctgcgtgaagacgacgggcccggtgagcttgagcctgaaagagagttcgacagaatcaatttcggtgtcgttgacggcggcctggcgcaaaatctcctgcacgtctcctgagttgtcttgataggcgatctcggccatgaactgctcgatctcttcctcctggagatctccgcgtccggctcgctccacggtggcggcgaggtcgttggaaatgcgggccatgagctgcgagaaggcgttgaggcctccctcgttccagacgcggctgtagaccacgcccccttcggcatcgcgggcgcgcatgaccacctgcgcgagattgagctccacgtgccgggcgaagacggcgtagtttcgcaggcgctgaaagaggtagttgagggtggtggcggtgtgttctgccacgaagaagtacataacccagcgtcgcaacgtggattcgttgatatcccccaaggcctcaaggcgctccatggcctcgtagaagtccacggcgaagttgaaaaactgggagttgcgcgccgacacggttaactcctcctccagaagacggatgagctcggcgacagtgtcgcgcacctcgcgctcaaaggctacaggggcctcttcttcttcttcaatctcctcttccataagggcctccccttcttcttcttctggcggcggtgggggaggggggacacggcggcgacgacggcgcaccgggaggcggtcgacaaagcgctcgatcatctccccgcggcgacggcgcatggtctcggtgacggcgcggccgttctcgcgggggcgcagttggaagacgccgcccgtcatgtcccggttatgggttggcggggggctgccatgcggcagggatacggcgctaacgatgcatctcaacaattgttgtgtaggtactccgccgccgagggacctgagcgagtccgcatcgaccggatcggaaaacctctcgagaaaggcgtctaaccagtcacagtcgcaaggtaggctgagcaccgtggcgggcggcagcgggcggcggtcggggttgtttctggcggaggtgctgctgatgatgtaattaaagtaggcggtcttgagacggcggatggtcgacagaagcaccatgtccttgggtccggcctgctgaatgcgcaggcggtcggccatgccccaggcttcgttttgacatcggcgcaggtctttgtagtagtcttgcatgagcctttctaccggcacttcttcttctccttcctcttgtcctgcatctcttgcatctatcgctgcggcggcggcggagtttggccgtaggtggcgccctcttcctcccatgcgtgtgaccccgaagcccctcatcggctgaagcagggctaggtcggcgacaacgcgctcggctaatatggcctgctgcacctgcgtgagggtagactggaagtcatccatgtccacaaagcggtggtatgcgcccgtgttgatggtgtaagtgcagttggccataacggaccagttaacggtctggtgacccggctgcgagagctcggtgtacctgagacgcgagtaagccctcgagtcaaatacgtagtcgttgcaagtccgcaccaggtactggtatcccaccaaaaagtgcggcggcggctggcggtagaggggccagcgtagggtggccggggctccgggggcgagatcttccaacataaggcgatgatatccgtagatgtacctggacatccaggtgatgccggcggcggtggtggaggcgcgcggaaagtcgcggacgcggttccagatgttgcgcagcggcaaaaagtgctccatggtcgggacgctctggccggtcaggcgcgcgcaatcgttgacgctctaccgtgcaaaaggagagcctgtaagcgggcactcttccgtggtctggtggataaattcgcaagggtatcatggcggacgaccggggttcgagccccgtatccggccgtccgccgtgatccatgcggttaccgcccgcgtgtcgaacccaggtgtgcgacgtcagacaacgggggagtgctccttttggcttccttccaggcgcggcggctgctgcgctagcttttttggccactggccgcgcgcagcgtaagcggttaggctggaaagcgaaagcattaagtggctcgctccctgtagccggagggttattttccaagggttgagtcgcgggacccccggttcgagtctcggaccggccggactgcggcgaacgggggtttgcctccccgtcatgcaagaccccgcttgcaaattcctccggaaacagggacgagccccttttttgcttttcccagatgcatccggtgctgcggcagatgcgcccccctcctcagcagcggcaagagcaagagcagcggcagacatgcagggcaccctcccctcctcctaccgcgtcaggaggggcgacatccgcggttgacgcggcagcagatggtgattacgaacccccgcggcgccgggcccggcactacctggacttggaggagggcgagggcctggcgcggctaggagcgccctctcctgagcggtacccaagggtgcagctgaagcgtgatacgcgtgaggcgtacgtgccgcggcagaacctgtttcgcgaccgcgagggagaggagcccgaggagatgcgggatcgaaagttccacgcagggcgcgagctgcggcatggcctgaatcgcgagcggttgctgcgcgaggaggactttgagcccgacgcgcgaaccgggattagtcccgcgcgcgcacacgtggcggccgccgacctggtaaccgcatacgagcagacggtgaaccaggagattaactttcaaaaaagctttaacaaccacgtgcgtacgcttgtggcgcgcgaggaggtggctataggactgatgcatctgtgggactttgtaagcgcgctggagcaaaacccaaatagcaagccgctcatggcgcagctgttccttatagtgcagcacagcagggacaacgaggcattcagggatgcgctgctaaacatagtagagcccgagggccgctggctgctcgatttgataaacatcctgcagagcatagtggtgcaggagcgcagcttgagcctggctgacaaggtggccgccatcaactattccatgcttagcctgggcaagttttacgcccgcaagatataccataccccttacgttcccatagacaaggaggtaaagatcgaggggttctacatgcgcatggcgctgaaggtgcttaccttgagcgacgacctgggcgtttatcgcaacgagcgcatccacaaggccgtgagcgtgagccggcggcgcgagctcagcgaccgcgagctgatgcacagcctgcaaagggccctggctggcacgggcagcggcgatagagaggccgagtcctactttgacgcgggcgctgacctgcgctgggccccaagccgacgcgccctggaggcagctggggccggacctgggctggcggtggcacccgcgcgcgctggcaacgtcggcggcgtggaggaatatgacgaggacgatgagtacgagccagaggacggcgagtactaagcggtgatgtttctgatcagatgatgcaagacgcaacggacccggcggtgcgggcggcgctgcagagccagccgtccggccttaactccacggacgactggcgccaggtcatggaccgcatcatgtcgctgactgcgcgcaatcctgacgcgttccggcagcagccgcaggccaaccggctctccgcaattctggaagcggtggtcccggcgcgcgcaaaccccacgcacgagaaggtgctggcgatcgtaaacgcgctggccgaaaacagggccatccggcccgacgaggccggcctggtctacgacgcgctgcttcagcgcgtggctcgttacaacagcggcaacgtgcagaccaacctggaccggctggtgggggatgtgcgcgaggccgtggcgcagcgtgagcgcgcgcagcagcagggcaacctgggctccatggttgcactaaacgccttcctgagtacacagcccgccaacgtgccgcggggacaggaggactacaccaactttgtgagcgcactgcggctaatggtgactgagacaccgcaaagtgaggtgtaccagtctgggccagactattttttccagaccagtagacaaggcctgcagaccgtaaacctgagccaggctttcaaaaacttgcaggggctgtggggggtgcgggctcccacaggcgaccgcgcgaccgtgtctagcttgctgacgcccaactcgcgcctgttgctgctgctaatagcgcccttcacggacagtggcagcgtgtcccgggacacatacctaggtcacttgctgacactgtaccgcgaggccataggtcaggcgcatgtggacgagcatactttccaggagattacaagtgtcagccgcgcgctggggcaggaggacacgggcagcctggaggcaaccctaaactacctgctgaccaaccggcggcagaagatcccctcgttgcacagtttaaacagcgaggaggagcgcattttgcgctacgtgcagcagagcgtgagccttaacctgatgcgcgacggggtaacgcccagcgtggcgctggacatgaccgcgcgcaacatggaaccgggcatgtatgcctcaaaccggccgtttatcaaccgcctaatggactacttgcatcgcgcggccgccgtgaaccccgagtatttcaccaatgccatcttgaacccgcactggctaccgccccctggtttctacaccgggggattcgaggtgcccgagggtaacgatggattcctctgggacgacatagacgacagcgtgttttccccgcaaccgcagaccctgctagagttgcaacagcgcgagcaggcagaggcggcgctgcgaaaggaaagcttccgcaggccaagcagcttgtccgatctaggcgctgcggccccgcggtcagatgctagtagcccatttccaagcttgatagggtctcttaccagcactcgcaccacccgcccgcgcctgctgggcgaggaggagtacctaaacaactcgctgctgcagccgcagcgcgaaaaaaacctgcctccggcatttcccaacaacgggatagagagcctagtggacaagatgagtagatggaagacgtacgcgcaggagcacagggacgtgccaggcccgcgcccgcccacccgtcgtcaaaggcacgaccgtcagcggggtctggtgtgggaggacgatgactcggcagacgacagcagcgtcctggatttgggagggagtggcaacccgtttgcgcaccttcgccccaggctggggagaatgttttaaaaaaaaaaaagcatgatgcaaaataaaaaactcaccaaggccatggcaccgagcgttggttttcttgtattccccttagtatgcggcgcgcggcgatgtatgaggaaggtcctcctccctcctacgagagtgtggtgagcgcggcgccagtggcggcggcgctgggttctcccttcgatgctcccctggacccgccgtttgtgcctccgcggtacctgcggcctaccggggggagaaacagcatccgttactctgagttggcacccctattcgacaccacccgtgtgtacctggtggacaacaagtcaacggatgtggcatccctgaactaccagaacgaccacagcaactttctgaccacggtcattcaaaacaatgactacagcccgggggaggcaagcacacagaccatcaatcttgacgaccggtcgcactggggcggcgacctgaaaaccatcctgcataccaacatgccaaatgtgaacgagttcatgtttaccaataagtttaaggcgcgggtgatggtgtcgcgcttgcctactaaggacaatcaggtggagctgaaatacgagtgggtggagttcacgctgcccgagggcaactactccgagaccatgaccatagaccttatgaacaacgcgatcgtggagcactacttgaaagtgggcagacagaacggggttctggaaagcgacatcggggtaaagtttgacacccgcaacttcagactggggtttgaccccgtcactggtcttgtcatgcctggggtatatacaaacgaagccttccatccagacatcattttgctgccaggatgcggggtggacttcacccacagccgcctgagcaacttgttgggcatccgcaagcggcaacccttccaggagggctttaggatcacctacgatgatctggagggtggtaacattcccgcactgttggatgtggacgcctaccaggcgagcttgaaagatgacaccgaacagggcgggggtggcgcaggcggcagcaacagcagtggcagcggcgcggaagagaactccaacgcggcagccgcggcaatgcagccggtggaggacatgaacgatcatgccattcgcggcgacacctttgccacacgggctgaggagaagcgcgctgaggccgaagcagcggccgaagctgccgcccccgctgcgcaacccgaggtcgagaagcctcagaagaaaccggtgatcaaacccctgacagaggacagcaagaaacgcagttacaacctaataagcaatgacagcaccttcacccagtaccgcagctggtaccttgcatacaactacggcgaccctcagaccggaatccgctcatggaccctgctttgcactcctgacgtaacctgcggctcggagcaggtctactggtcgttgccagacatgatgcaagaccccgtgaccttccgctccacgcgccagatcagcaactttccggtggtgggcgccgagctgttgcccgtgcactccaagagcttctacaacgaccaggccgtctactcccaactcatccgccagtttacctctctgacccacgtgttcaatcgctttcccgagaaccagattttggcgcgcccgccagcccccaccatcaccaccgtcagtgaaaacgttcctgctctcacagatcacgggacgctaccgctgcgcaacagcatcggaggagtccagcgagtgaccattactgacgccagacgccgcacctgcccctacgtttacaaggccctgggcatagtctcgccgcgcgtcctatcgagccgcactttttgagcaagcatgtccatccttatatcgcccagcaataacacaggctggggcctgcgcttcccaagcaagatgtttggcggggccaagaagcgctccgaccaacacccagtgcgcgtgcgcgggcactaccgcgcgccctggggcgcgcacaaacgcggccgcactgggcgcaccaccgtcgatgacgccatcgacgcggtggtggaggaggcgcgcaactacacgcccacgccgccaccagtgtccacagtggacgcggccattcagaccgtggtgcgcggagcccggcgctatgctaaaatgaagagacggcggaggcgcgtagcacgtcgccaccgccgccgacccggcactgccgcccaacgcgcggcggcggccctgcttaaccgcgcacgtcgcaccggccgacgggcggccatgcgggccgctcgaaggctggccgcgggtattgtcactgtgccccccaggtccaggcgacgagcggccgccgcagcagccgcggccattagtgctatgactcagggtcgcaggggcaacgtgtattgggtgcgcgactcggttagcggcctgcgcgtgcccgtgcgcacccgccccccgcgcaactagattgcaagaaaaaactacttagactcgtactgttgtatgtatccagcggcggcggcgcgcaacgaagctatgtccaagcgcaaaatcaaagaagagatgctccaggtcatcgcgccggagatctatggccccccgaagaaggaagagcaggattacaagccccgaaagctaaagcgggtcaaaaagaaaaagaaagatgatgatgatgaacttgacgacgaggtggaactgctgcacgctaccgcgcccaggcgacgggtacagtggaaaggtcgacgcgtaaaacgtgttttgcgacccggcaccaccgtagtctttacgcccggtgagcgctccacccgcacctacaagcgcgtgtatgatgaggtgtacggcgacgaggacctgcttgagcaggccaacgagcgcctcggggagtttgcctacggaaagcggcataaggacatgctggcgttgccgctggacgagggcaacccaacacctagcctaaagcccgtaacactgcagcaggtgctgcccgcgcttgcaccgtccgaagaaaagcgcggcctaaagcgcgagtctggtgacttggcacccaccgtgcagctgatggtacccaagcgccagcgactggaagatgtcttggaaaaaatgaccgtggaacctgggctggagcccgaggtccgcgtgcggccaatcaagcaggtggcgccgggactgggcgtgcagaccgtggacgttcagatacccactaccagtagcaccagtattgccaccgccacagagggcatggagacacaaacgtccccggttgcctcagcggtggcggatgccgcggtgcaggcggtcgctgcggccgcgtccaagacctctacggaggtgcaaacggacccgtggatgtttcgcgtttcagccccccggcgcccgcgcggttcgaggaagtacggcgccgccagcgcgctactgcccgaatatgccctacatccttccattgcgcctacccccggctatcgtggctacacctaccgccccagaagacgagcaactacccgacgccgaaccaccactggaacccgccgccgccgtcgccgtcgccagcccgtgctggccccgatttccgtgcgcagggtggctcgcgaaggaggcaggaccctggtgctgccaacagcgcgctaccaccccagcatcgtttaaaagccggtctttgtggttcttgcagatatggccctcacctgccgcctccgtttcccggtgccgggattccgaggaagaatgcaccgtaggaggggcatggccggccacggcctgacgggcggcatgcgtcgtgcgcaccaccggcggcggcgcgcgtcgcaccgtcgcatgcgcggcggtatcctgcccctccttattccactgatcgccgcggcgattggcgccgtgcccggaattgcatccgtggccttgcaggcgcagagacactgattaaaaacaagttgcatgtggaaaaatcaaaataaaaagtctggactctcacgctcgcttggtcctgtaactattttgtagaatggaagacatcaactttgcgtctctggccccgcgacacggctcgcgcccgttcatgggaaactggcaagatatcggcaccagcaatatgagcggtggcgccttcagctggggctcgctgtggagcggcattaaaaatttcggttccaccgttaagaactatggcagcaaggcctggaacagcagcacaggccagatgctgagggataagttgaaagagcaaaatttccaacaaaaggtggtagatggcctggcctctggcattagcggggtggtggacctggccaaccaggcagtgcaaaataagattaacagtaagcttgatccccgccctcccgtagaggagcctccaccggccgtggagacagtgtctccagaggggcgtggcgaaaagcgtccgcgccccgacagggaagaaactctggtgacgcaaatagacgagcctccctcgtacgaggaggcactaaagcaaggcctgcccaccacccgtcccatcgcgcccatggctaccggagtgctgggccagcacacacccgtaacgctggacctgcctccccccgccgacacccagcagaaacctgtgctgccaggcccgaccgccgttgttgtaacccgtcctagccgcgcgtccctgcgccgcgccgccagcggtccgcgatcgttgcggcccgtagccagtggcaactggcaaagcacactgaacagcatcgtgggtctgggggtgcaatccctgaagcgccgacgatgcttctgaatagctaacgtgtcgtatgtgtgtcatgtatgcgtccatgtcgccgccagaggagctgctgagccgccgcgcgcccgctttccaagatggctaccccttcgatgatgccgcagtggtcttacatgcacatctcgggccaggacgcctcggagtacctgagccccgggctggtgcagtttgcccgcgccaccgagacgtacttcagcctgaataacaagtttagaaaccccacggtggcgcctacgcacgacgtgaccacagaccggtcccagcgtttgacgctgcggttcatccctgtggaccgtgaggatactgcgtactcgtacaaggcgcggttcaccctagctgtgggtgataaccgtgtgctggacatggcttccacgtactttgacatccgcggcgtgctggacaggggccctacttttaagccctactctggcactgcctacaacgccctggctcccaagggtgccccaaatccttgcgaatgggatgaagctgctactgctcttgaaataaacctagaagaagaggacgatgacaacgaagacgaagtagacgagcaagctgagcagcaaaaaactcacgtatttgggcaggcgccttattctggtataaatattacaaaggagggtattcaaataggtgtcgaaggtcaaacacctaaatatgccgataaaacatttcaacctgaacctcaaataggagaatctcagtggtacgaaactgaaattaatcatgcagctgggagagtccttaaaaagactaccccaatgaaaccatgttacggttcatatgcaaaacccacaaatgaaaatggagggcaaggcattcttgtaaagcaacaaaatggaaagctagaaagtcaagtggaaatgcaatttttctcaactactgaggcgaccgcaggcaatggtgataacttgactcctaaagtggtattgtacagtgaagatgtagatatagaaaccccagacactcatatttcttacatgcccactattaaggaaggtaactcacgagaactaatgggccaacaatctatgcccaacaggcctaattacattgcttttagggacaattttattggtctaatgtattacaacagcacgggtaatatgggtgttctggcgggccaagcatcgcagttgaatgctgttgtagatttgcaagacagaaacacagagctttcataccagcttttgcttgattccattggtgatagaaccaggtacttttctatgtggaatcaggctgttgacagctatgatccagatgttagaattattgaaaatcatggaactgaagatgaacttccaaattactgctttccactgggaggtgtgattaatacagagactcttaccaaggtaaaacctaaaacaggtcaggaaaatggatgggaaaaagatgctacagaattttcagataaaaatgaaataagagttggaaataattttgccatggaaatcaatctaaatgccaacctgtggagaaatttcctgtactccaacatagcgctgtatttgcccgacaagctaaagtacagtccttccaacgtaaaaatttctgataacccaaacacctacgactacatgaacaagcgagtggtggctcccgggttagtggactgctacattaaccttggagcacgctggtcccttgactatatggacaacgtcaacccatttaaccaccaccgcaatgctggcctgcgctaccgctcaatgttgctgggcaatggtcgctatgtgcccttccacatccaggtgcctcagaagttctttgccattaaaaacctccttctcctgccgggctcatacacctacgagtggaacttcaggaaggatgttaacatggttctgcagagctccctaggaaatgacctaagggttgacggagccagcattaagtttgatagcatttgcctttacgccaccttcttccccatggcccacaacaccgcctccacgcttgaggccatgcttagaaacgacaccaacgaccagtcctttaacgactatctctccgccgccaacatgctctaccctatacccgccaacgctaccaacgtgcccatatccatcccctcccgcaactgggcggctttccgcggctgggccttcacgcgccttaagactaaggaaaccccatcactgggctcgggctacgacccttattacacctactctggctctataccctacctagatggaaccttttacctcaaccacacctttaagaaggtggccattacctttgactcttctgtcagctggcctggcaatgaccgcctgcttacccccaacgagtttgaaattaagcgctcagttgacggggagggttacaacgttgcccagtgtaacatgaccaaagactggttcctggtacaaatgctagctaactacaacattggctaccagggcttctatatcccagagagctacaaggaccgcatgtactccttctttagaaacttccagcccatgagccgtcaggtggtggatgatactaaatacaaggactaccaacaggtgggcatcctacaccaacacaacaactctggatttgttggctaccttgcccccaccatgcgcgaaggacaggcctaccctgctaacttcccctatccgcttataggcaagaccgcagttgacagcattacccagaaaaagtttctttgcgatcgcaccctttggcgcatcccattctccagtaactttatgtccatgggcgcactcacagacctgggccaaaaccttctctacgccaactccgcccacgcgctagacatgacttttgaggtggatcccatggacgagcccacccttctttatgttttgtttgaagtctttgacgtggtccgtgtgcaccggccgcaccgcggcgtcatcgaaaccgtgtacctgcgcacgcccttctcggccggcaacgccacaacataaagaagcaagcaacatcaacaacagctgccgccatgggctccagtgagcaggaactgaaagccattgtcaaagatcttggttgtgggccatattttttgggcacctatgacaagcgctttccaggctttgtttctccacacaagctcgcctgcgccatagtcaatacggccggtcgcgagactgggggcgtacactggatggcctttgcctggaacccgcactcaaaaacatgctacctctttgagccctttggcttttctgaccagcgactcaagcaggtttaccagtttgagtacgagtcactcctgcgccgtagcgccattgcttcttcccccgaccgctgtataacgctggaaaagtccacccaaagcgtacaggggcccaactcggccgcctgtggactattctgctgcatgtttctccacgcctttgccaactggccccaaactcccatggatcacaaccccaccatgaaccttattaccggggtacccaactccatgctcaacagtccccaggtacagcccaccctgcgtcgcaaccaggaacagctctacagcttcctggagcgccactcgccctacttccgcagccacagtgcgcagattaggagcgccacttctttttgtcacttgaaaaacatgtaaaaataatgtactagagacactttcaataaaggcaaatgcttttatttgtacactctcgggtgattatttacccccacccttgccgtctgcgccgtttaaaaatcaaaggggttctgccgcgcatcgctatgcgccactggcagggacacgttgcgatactggtgtttagtgctccacttaaactcaggcacaaccatccgcggcagctcggtgaagttttcactccacaggctgcgcaccatcaccaacgcgtttagcaggtcgggcgccgatatcttgaagtcgcagttggggcctccgccctgcgcgcgcgagttgcgatacacagggttgcagcactggaacactatcagcgccgggtggtgcacgctggccagcacgctcttgtcggagatcagatccgcgtccaggtcctccgcgttgctcagggcgaacggagtcaactttggtagctgccttcccaaaaagggcgcgtgcccaggctttgagttgcactcgcaccgtagtggcatcaaaaggtgaccgtgcccggtctgggcgttaggatacagcgcctgcataaaagccttgatctgcttaaaagccacctgagcctttgcgccttcagagaagaacatgccgcaagacttgccggaaaactgattggccggacaggccgcgtcgtgcacgcagcaccttgcgtcggtgttggagatctgcaccacatttcggccccaccggttcttcacgatcttggccttgctagactgctccttcagcgcgcgctgcccgttttcgctcgtcacatccatttcaatcacgtgctccttatttatcataatgcttccgtgtagacacttaagctcgccttcgatctcagcgcagcggtgcagccacaacgcgcagcccgtgggctcgtgatgcttgtaggtcacctctgcaaacgactgcaggtacgcctgcaggaatcgccccatcatcgtcacaaaggtcttgttgctggtgaaggtcagctgcaacccgcggtgctcctcgttcagccaggtcttgcatacggccgccagagcttccacttggtcaggcagtagtttgaagttcgcctttagatcgttatccacgtggtacttgtccatcagcgcgcgcgcagcctccatgcccttctcccacgcagacacgatcggcacactcagcgggttcatcaccgtaatttcactttccgcttcgctgggctcttcctcttcctcttgcgtccgcataccacgcgccactgggtcgtcttcattcagccgccgcactgtgcgcttacctcctttgccatgcttgattagcaccggtgggttgctgaaacccaccatttgtagcgccacatcttctctttcttcctcgctgtccacgattacctctggtgatggcgggcgctcgggcttgggagaagggcgcttctttttcttcttgggcgcaatggccaaatccgccgccgaggtcgatggccgcgggctgggtgtgcgcggcaccagcgcgtcttgtgatgagtcttcctcgtcctcggactcgatacgccgcctcatccgcttttttgggggcgcccggggaggcggcggcgacggggacggggacgacacgtcctccatggttgggggacgtcgcgccgcaccgcgtccgcgctcgggggtggtttcgcgctgctcctcttcccgactggccatttccttctcctataggcagaaaaagatcatggagtcagtcgagaagaaggacagcctaaccgccccctctgagttcgccaccaccgcctccaccgatgccgccaacgcgcctaccaccttccccgtcgaggcacccccgcttgaggaggaggaagtgattatcgagcaggacccaggttttgtaagcgaagacgacgaggaccgctcagtaccaacagaggataaaaagcaagaccaggacaacgcagaggcaaacgaggaacaagtcgggcggggggacgaaaggcatggcgactacctagatgtgggagacgacgtgctgttgaagcatctgcagcgccagtgcgccattatctgcgacgcgttgcaagagcgcagcgatgtgcccctcgccatagcggatgtcagccttgcctacgaacgccacctattctcaccgcgcgtaccccccaaacgccaagaaaacggcacatgcgagcccaacccgcgcctcaacttctaccccgtatttgccgtgccagaggtgcttgccacctatcacatctttttccaaaactgcaagatacccctatcctgccgtgccaaccgcagccgagcggacaagcagctggccttgcggcagggcgctgtcatacctgatatcgcctcgctcaacgaagtgccaaaaatctttgagggtcttggacgcgacgagaagcgcgcggcaaacgctctgcaacaggaaaacagcgaaaatgaaagtcactctggagtgttggtggaactcgagggtgacaacgcgcgcctagccgtactaaaacgcagcatcgaggtcacccactttgcctacccggcacttaacctaccccccaaggtcatgagcacagtcatgagtgagctgatcgtgcgccgtgcgcagcccctggagagggatgcaaatttgcaagaacaaacagaggagggcctacccgcagttggcgacgagcagctagcgcgctggcttcaaacgcgcgagcctgccgacttggaggagcgacgcaaactaatgatggccgcagtgctcgttaccgtggagcttgagtgcatgcagcggttctttgctgacccggagatgcagcgcaagctagaggaaacattgcactacacctttcgacagggctacgtacgccaggcctgcaagatctccaacgtggagctctgcaacctggtctcctaccttggaattttgcacgaaaaccgccttgggcaaaacgtgcttcattccacgctcaagggcgaggcgcgccgcgactacgtccgcgactgcgtttacttatttctatgctacacctggcagacggccatgggcgtttggcagcagtgcttggaggagtgcaacctcaaggagctgcagaaactgctaaagcaaaacttgaaggacctatggacggccttcaacgagcgctccgtggccgcgcacctggcggacatcattttccccgaacgcctgcttaaaaccctgcaacagggtctgccagacttcaccagtcaaagcatgttgcagaactttaggaactttatcctagagcgctcaggaatcttgcccgccacctgctgtgcacttcctagcgactttgtgcccattaagtaccgcgaatgccctccgccgctttggggccactgctaccttctgcagctagccaactaccttgcctaccactctgacataatggaagacgtgagcggtgacggtctactggagtgtcactgtcgctgcaacctatgcaccccgcaccgctccctggtttgcaattcgcagctgcttaacgaaagtcaaattatcggtacctttgagctgcagggtccctcgcctgacgaaaagtccgcggctccggggttgaaactcactccggggctgtggacgtcggcttaccttcgcaaatttgtacctgaggactaccacgcccacgagattaggttctacgaagaccaatcccgcccgccaaatgcggagcttaccgcctgcgtcattacccagggccacattcttggccaattgcaagccatcaacaaagcccgccaagagtttctgctacgaaagggacggggggtttacttggacccccagtccggcgaggagctcaacccaatccccccgccgccgcagccctatcagcagcagccgcgggcccttgcttcccaggatggcacccaaaaagaagctgcagctgccgccgccacccacggacgaggaggaatactgggacagtcaggcagaggaggttttggacgaggaggaggaggacatgatggaagactgggagagcctagacgaggaagcttccgaggtcgaagaggtgtcagacgaaacaccgtcaccctcggtcgcattcccctcgccggcgccccagaaatcggcaaccggttccagcatggctacaacctccgctcctcaggcgccgccggcactgcccgttcgccgacccaaccgtagatgggacaccactggaaccagggccggtaagtccaagcagccgccgccgttagcccaagagcaacaacagcgccaaggctaccgctcatggcgcgggcacaagaacgccatagttgcttgcttgcaagactgtgggggcaacatctccttcgcccgccgctttcttctctaccatcacggcgtggccttcccccgtaacatcctgcattactaccgtcatctctacagcccatactgcaccggcggcagcggcagcggcagcaacagcagcggccacacagaagcaaaggcgaccggatagcaagactctgacaaagcccaagaaatccacagcggcggcagcagcaggaggaggagcgctgcgtctggcgcccaacgaacccgtatcgacccgcgagcttagaaacaggatttttcccactctgtatgctatatttcaacagagcaggggccaagaacaagagctgaaaataaaaaacaggtctctgcgatccctcacccgcagctgcctgtatcacaaaagcgaagatcagcttcggcgcacgctggaagacgcggaggctctcttcagtaaatactgcgcgctgactcttaaggactagtttcgcgccctttctcaaatttaagcgcgaaaactacgtcatctccagcggccacacccggcgccagcacctgtcgtcagcgccattatgagcaaggaaattcccacgccctacatgtggagttaccagccacaaatgggacttgcggctggagctgcccaagactactcaacccgaataaactacatgagcgcgggaccccacatgatatcccgggtcaacggaatccgcgcccaccgaaaccgaattctcttggaacaggcggctattaccaccacacctcgtaataaccttaatccccgtagttggcccgctgccctggtgtaccaggaaagtcccgctcccaccactgtggtacttcccagagacgcccaggccgaagttcagatgactaactcaggggcgcagcttgcgggcggctttcgtcacagggtgcggtcgcccgggcagggtataactcacctgacaatcagagggcgaggtattcagctcaacgacgagtcggtgagctcctcgcttggtctccgtccggacgggacatttcagatcggcggcgccggccgtccttcattcacgcctcgtcaggcaatcctaactctgcagacctcgtcctctgagccgcgctctggaggcattggaactctgcaatttattgaggagtttgtgccatcggtctactttaaccccttctcgggacctcccggccactatccggatcaatttattcctaactttgacgcggtaaaggactcggcggacggctacgactgaatgttaagtggagaggcagagcaactgcgcctgaaacacctggtccactgtcgccgccacaagtgctttgcccgcgactccggtgagttttgctactttgaattgcccgaggatcatatcgagggcccggcgcacggcgtccggcttaccgcccagggagagcttgcccgtagcctgattcgggagtttacccagcgccccctgctagttgagcgggacaggggaccctgtgttctcactgtgatttgcaactgtcctaaccttggattacatcaagatcctctagttataactagagtacccggggatcttattccctttaactaataaaaaaaaataataaagcatcacttacttaaaatcagttagcaaatttctgtccagtttattcagcagcacctccttgccctcctcccagctctggtattgcagcttcctcctggctgcaaactttctccacaatctaaatggaatgtcagtttcctcctgttcctgtccatccgcacccactatcttcatgttgttgcagatgaagcgcgcaagaccgtctgaagataccttcaaccccgtgtatccatatgacacggaaaccggtcctccaactgtgccttttcttactcctccctttgtatcccccaatgggtttcaagagagtccccctggggtactctctttgcgcctatccgaacctctagttacctccaatggcatgcttgcgctcaaaatgggcaacggcctctctctggacgaggccggcaaccttacctcccaaaatgtaaccactgtgagcccacctctcaaaaaaaccaagtcaaacataaacctggaaatatctgcacccctcacagttacctcagaagccctaactgtggctgccgccgcacctctaatggtcgcgggcaacacactcaccatgcaatcacaggccccgctaaccgtgcacgactccaaacttagcattgccacccaaggacccctcacagtgtcagaaggaaagctagccctgcaaacatcaggccccctcaccaccaccgatagcagtacccttactatcactgcctcaccccctctaactactgccactggtagcttgggcattgacttgaaagagcccatttatacacaaaatggaaaactaggactaaagtacggggctcctttgcatgtaacagacgacctaaacactttgaccgtagcaactggtccaggtgtgactattaataatacttccttgcaaactaaagttactggagccttgggttttgattcacaaggcaatatgcaacttaatgtagcaggaggactaaggattgattctcaaaacagacgccttatacttgatgttagttatccgtttgatgctcaaaaccaactaaatctaagactaggacagggccctctttttataaactcagcccacaacttggatattaactacaacaaaggcctttacttgtttacagcttcaaacaattccaaaaagcttgaggttaacctaagcactgccaaggggttgatgtttgacgctacagccatagccattaatgcaggagatgggcttgaatttggttcacctaatgcaccaaacacaaatcccctcaaaacaaaaattggccatggcctagaatttgattcaaacaaggctatggttcctaaactaggaactggccttagttttgacagcacaggtgccattacagtaggaaacaaaaataatgataagctaactttgtggaccacaccagctccatctcctaactgtagactaaatgcagagaaagatgctaaactcactttggtcttaacaaaatgtggcagtcaaatacttgctacagtttcagttttggctgttaaaggcagtttggctccaatatctggaacagttcaaagtgctcatcttattataagatttgacgaaaatggagtgctactaaacaattccttcctggacccagaatattggaactttagaaatggagatcttactgaaggcacagcctatacaaacgctgttggatttatgcctaacctatcagcttatccaaaatctcacggtaaaactgccaaaagtaacattgtcagtcaagtttacttaaacggagacaaaactaaacctgtaacactaaccattacactaaacggtacacaggaaacaggagacacaactccaagtgcatactctatgtcattttcatgggactggtctggccacaactacattaatgaaatatttgccacatcctcttacactttttcatacattgcccaagaataaagaatcgtttgtgttatgtttcaacgtgtttatttttcaattgcagaaaatttcaagtcatttttcattcagtagtatagccccaccaccacatagcttatacagatcaccgtaccttaatcaaactcacagaaccctagtattcaacctgccacctccctcccaacacacagagtacacagtcctttctccccggctggccttaaaaagcatcatatcatgggtaacagacatattcttaggtgttatattccacacggtttcctgtcgagccaaacgctcatcaagtgatattaataaactccccgggcagctcacttaagttcatgtcgctgtccagctgctgagccacaggctgctgtccaacttgcggttgcttaacgggcggcgaaggagaagtccacgcctacatggggggagagtcataatcgtgcatcaggatagggcggtggtgctgcagcagcgcgcgaataaactgctgccgccgccgctccgtcctgcaggaatacaacatggcagtggtctcctcagcgatgattcgcaccgcccgcagcataaggcgcttgtcctccgggcacagcagcgcaccctgatctcacttaaatcagcacagtaactgcagcacagcaccacaatattgttcaaaatcccacagtgcaaggcgctgtatccaaagctcatggcggggaccacagaacccacgtggccatcataccacaagcgcaggtagattaagtggcgacccctcataaacacgctggacataaacattacctcttttggcatgttgtaattcaccacctcccggtaccatataaacctctgattaaacatggcgccatccaccaccatcctaaaccagctggccaaaacctgccccgccgggntatacactgcagggaaccgggacttggacaatgacaagtgggagagcccaggactcgtaaccatggatcatcatgctcgtcatgatatcaatgttggcacaacacaggcacacgtgcatacacttcctcaggattacaagctcctcccgcgttagaaccatatcccagggaacaacccattcctgaatcagcgtaaatcccacactgcagggaagacctcgcacgtaactcacgttgtgcattgtcaaagtgttacattcgggcagcagcggatgatcctccagtatggtagcgcgggtttctgtctcaaaaggaggtagacgatccctactgtacggagtgcgccgagacaaccgagatcgtgttggtcgtagtgtcatgccaaatggaacgccggacgtagtcatatttcctgaagcaaaaccaggtgcgggcgtgacaaacagatctgcgtctccggtctcgccgcttagatcgctctgtgtagtagttgtagtatatccactctctcaaagcatccaggcgccccctggcttcgggttctatgtaaactccttcatgcgccgctgccctgataacatccaccaccgcagaataagccacacccagccaacctacacattcgttctgcgagtcacacacgggaggagcgggaagagctggaagaaccatgtttttttttttattccaaaagattatccaaaacctcaaaatgaagatctattaagtgaacgcgctcccctccggtggcgtggtcaaactctacagccaaagaacagataatggcatttgtaagatgttgcacaatggcttccaaaaggcaaacggccctcacgtccaagtggacgtaaaggctaaacccttcagggtgaatctcctctataaacattccagcaccttcaaccatgcccaaataattctcatctcgccaccttctcaatatatctctaagcaaatcccgaatatttaagtccgggccattgtaaaaaatttggctccagagcgccctccaccttcagcctcaagcagcgaatcatgattgcaaaaattcaggttcctcacagacctgtataagattcaaaagcggaacattaacaaaaataccgcgatcccgtaggtcccttcgcagggccagctgaacataatcgtgcaggtctgcacggaccagcgcggccacttccccgccaggaaccatgacaaaagaacccacactgattatgacacgcatactcggagctatgctaaccagcgtagccccgatgtaagcttgttgcatgggcggcgatataaaatgcaaggtgctgctcaaaaaatcaggcaaagcctcgcgcaaaaaagaaagcacatcgtagtcatgctcatgcagataaaggcaggtaagctccggaaccaccacagaaaaagacaccatttttctctcaaacatgtctgcgggtttctgcataaacacaaaataaaataacaaaaaaacatttaaacattagaagcctgtcttacaacaggaaaaacaacccttataagcataagacggactacggccatgccggcgtgaccgtaaaaaaactggtcaccgtgattaaaaagcaccaccgacagctcctcggtcagtccggagtcataatgtaagactcggtaaacacatcaggttgattcacatcggtcagtgttaaaaagcgaccgaaatagccngggggaatacaatacccgcaggcgtagagacaacattacagcccccataggaggtataacaaaattaataggagagaaaaacacataaacacctgaaaaaccctcctgcctaggcaaaatagcaccctcccgctccagaacaacatacagcgcttccacagcggcagccataacagtcagccttaccagtaaaaaagaaaacctattaaaaaaacaccactcgacacggcaccagctcaatcagtcacagtgtaaaaaagggccaagtgcagagcgagtatatataggactaaaaaatgacggtaacggttaaagtccacaaaaaacacccagaaaaccgcacgcgaacctacgcccagaaacgaaagccaaaaaacccacaacttcctcaaatcgtcacttccgttttcccacgttacgtcacttcccattttaagaaaactacaattcccaacacatacaagttactccgccctaaaacctacgtcacccgccccgttcccacgccccgcgccacgtcacaaactccaccccctcattatcatattggcttcaatccaaaataaggtatattattgatgatg

SEQ ID NO: 55 - DNA, 38203 bp, Artificial Sequence
  Made in a laboratory from synthetic material
  misc_feature (1)...(38203): n = A,T,C or G
ttaattaacatgcatggatcctcgtctcgacgatgcccttgagagccttcaacccagtcagctccttccggtgggcgcggggcatgactatcgtcgccgcacttatgactgtcttctttatcatgcaactcgtaggacaggtgccggcagcgctctgggtcattttcggcgaggaccgctttcgctggagcgcgacgatgatcggcctgtcgcttgcggtattcggaatcttgcacgccctcgctcaagccttcgtcactggtcccgccaccaaacgtttcggcgagaagcaggccattatcgccggcatggcggccgacgcgctgggctacgtcttgctggcgttcgcgacgcgaggctggatggccttccccattatgattcttctcgcttccggcggcatcgggatgcccgcgttgcaggccatgctgtccaggcaggtagatgacgaccatcagggacagcttcaaggatcgctcgcggctcttaccagcctaacttcgatcactggaccgctgatcgtcacggcgatttatgccgcctcggcgagcacatggaacgggttggcatggattgtaggcgccgccctataccttgtctgcctccccgcgttgcgtcgcggtgcatggagccgggccacctcgacctgaatggaagccggcggcacctcgctaacggattcaccactccaagaattggagccaatcaattcttgcggagaactgtgaatgcgcaaaccaacccttggcagaacatatccatcgcgtccgccatctccagcagccgcacgcggcgcatctcgggcagcgttgggtcctggccacgggtgcgcatgatcgtgctcctgtcgttgaggacccggctaggctggcggggttgccttactggttagcagaatgaatcaccgatacgcgagcgaacgtgaagcgactgctgctgcaaaacgtctgcgacctgagcaacaacatgaatggtcttcggtttccgtgtttcgtaaagtctggaaacgcggaagtcagcgccctgcaccattatgttccggatctgcatcgcaggatgctgctggctaccctgtggaacacctacatctgtattaacgaagcgctggcattgaccctgagtgatttttctctggtcccgccgcatccataccgccagttgtttaccctcacaacgttccagtaaccgggcatgttcatcatcagtaacccgtatcgtgagcatcctctctcgtttcatcggtatcattacccccatgaacagaaattcccccttacacggaggcatcaagtgaccaaacaggaaaaaaccgcccttaacatggcccgctttatcagaagccagacattaacgcttctggagaaactcaacgagctggacgcggatgaacaggcagacatctgtgaatcgcttcacgaccacgctgatgagctttaccgcagctgcctcgcgcgtttcggtgatgacggtgaaaacctctgacacatgcagctcccggagacggtcacagcttgtctgtaagcggatgccgggagcagacaagcccgtcagggcgcgtcagcgggtgttggcgggtgtcggggcgcagccatgacccagtcacgtagcgatagcggagtgtatactggcttaactatgcggcatcagagcagattgtactgagagtgcaccatatgcggtgtgaaataccgcacagatgcgtaaggagaaaataccgcatcaggcgctcttccgcttcctcgctcactgactcgctgcgctcggtcgttcggctgcggcgagcggtatcagctcactcaaaggcggtaatacggttatccacagaatcaggggataacgcaggaaagaacatgtgagcaaaaggccagcaaaaggccaggaaccgtaaaaaggccgcgttgctggcgtttttccataggctccgcccccctgacgagcatcacaaaaatcgacgctcaagtcagaggtggcgaaacccgacaggactataaagataccaggcgtttccccctggaagctccctcgtgcgctctcctgttccgaccctgccgcttaccggatacctgtccgcctttctcccttcgggaagcgtggcgctttctcaatgctcacgctgtaggtatctcagttcggtgtaggtcgttcgctccaagctgggctgtgtgcacgaaccccccgttcagcccgaccgctgcgccttatccggtaactatcgtcttgagtccaacccggtaagacacgacttatcgccactggcagcagccactggtaacaggattagcagagcgaggtatgtaggcggtgctacagagttcttgaagtggtggcctaactacggctacactagaaggacagtatttggtatctgcgctctgctgaagccagttaccttcggaaaaagagttggtagctcttgatccggcaaacaaaccaccgctggtagcggtggtttttttgtttgcaagcagcagattacgcgcagaaaaaaaggatctcaagaagatcctttgatcttttctacggggtctgacgctcagtggaacgaaaactcacgttaagggattttggtcatgagattatcaaaaaggatcttcacctagatccttttaaattaaaaatgaagttttaaatcaatctaaagtatatatgagtaaacttggtctgacagttaccaatgcttaatcagtgaggcacctatctcagcgatctgtctatttcgttcatccatagttgcctgactccccgtcgtgtagataactacgatacgggagggcttaccatctggccccagtgctgcaatgataccgcgagacccacgctcaccggctccagatttatcagcaataaaccagccagccggaagggccgagcgcagaagtggtcctgcaactttatccgcctccatccagtctattaattgttgccgggaagctagagtaagtagttcgccagttaatagtttgcgcaacgttgttgnnnnaaaaaggatcttcacctagatccttttcacgtagaaagccagtccgcagaaacggtgctgaccccggatgaatgtcagctactgggctatctggacaagggaaaacgcaagcgcaaagagaaagcaggtagcttgcagtgggcttacatggcgatagctagactgggcggttttatggacagcaagcgaaccggaattgccagctggggcgccctctggtaaggttgggaagccctgcaaagtaaactggatggctttctcgccgccaaggatctgatggcgcaggggatcaagctctgatcaagagacaggatgaggatcgtttcgcatgattgaacaagatggattgcacgcaggttctccggccgcttgggtggagaggctattcggctatgactgggcacaacagacaatcggctgctctgatgccgccgtgttccggctgtcagcgcaggggcgcccggttctttttgtcaagaccgacctgtccggtgccctgaatgaactgcaagacgaggcagcgcggctatcgtggctggccacgacgggcgttccttgcgcagctgtgctcgacgttgtcactgaagcgggaagggactggctgctattgggcgaagtgccggggcaggatctcctgtcatctcaccttgctcctgccgagaaagtatccatcatggctgatgcaatgcggcggctgcatacgcttgatccggctacctgcccattcgaccaccaagcgaaacatcgcatcgagcgagcacgtactcggatggaagccggtcttgtcgatcaggatgatctggacgaagagcatcaggggctcgcgccagccgaactgttcgccaggctcaaggcgagcatgcccgacggcgaggatctcgtcgtgacccatggcgatgcctgcttgccgaatatcatggtggaaaatggccgcttttctggattcatcgactgtggccggctgggtgtggcggaccgctatcaggacatagcgttggctacccgtgatattgctgaagagcttggcggcgaatgggctgaccgcttcctcgtgctttacggtatcgccgctcccgattcgcagcgcatcgccttctatcgccttcttgacgagttcttctgaattttgttaaaatttttgttaaatcagctcattttttaaccaataggccgaaatcggcaacatcccttataaatcaaaagaatagaccgcgatagggttgagtgttgttccagtttggaacaagagtccactattaaagaacgtggactccaacgtcaaagggcgaaaaaccgtctatcagggcgatggcccactacgtgaaccatcacccaaatcaagttttttgcggtcgaggtgccgtaaagctctaaatcggaaccctaaagggagcccccgatttagagcttgacggggaaagccggcgaacgtggcgagaaaggaagggaagaaagcgaaaggagcgggcgctagggcgctggcaagtgtagcggtcacgctgcgcgtaaccaccacacccgcgcgcttaatgcgccgctacagggcgcgtccattcgccattcaggatcgaattaattcttaattaacatcatcaataatataccttattttggattgaagccaatatgataatgagggggtggagtttgtgacgtggcgcggggcgtgggaacggggcgggtgacgtagtagtgtggcggaagtgtgatgttgcaagtgtggcggaacacatgtaagcgacggatgtggcaaaagtgacgtttttggtgtgcgccggtgtacacaggaagtgacaattttcgcgcggttttaggcggatgttgtagtaaatttgggcgtaaccgagtaagatttggccattttcgcgggaaaactgaataagaggaagtgaaatctgaataattttgtgttactcatagcgcgtaannnntaatagtaatcaattacggggtcattagttcatagcccatatatggagttccgcgttacataacttacggtaaatggcccgcctggctgaccgcccaacgacccccgcccattgacgtcaataatgacgtatgttcccatagtaacgccaatagggactttccattgacgtcaatgggtggagtatttacggtaaactgcccacttggcagtacatcaagtgtatcatatgccaagtacgccccctattgacgtcaatgacggtaaatggcccgcctggcattatgcccagtacatgaccttatgggactttcctacttggcagtacatctacgtattagtcatcgctattaccatggtgatgcggttttggcagtacatcaatgggcgtggatagcggtttgactcacggggatttccaagtctccaccccattgacgtcaatgggagtttgttttggcaccaaaatcaacgggactttccaaaatgtcgtaacaactccgccccattgacgcaaatgggcggtaggcgtgtacggtgggaggtctatataagcagagctggtttagtgaaccgtcagatccgctagagatctggtaccgtcgacgcggccgctcgagcctaagcttctagagtcgaggtcgagaattcggatccaccatgctagcgctaccggtcgccaccatggtgagcaagggcgaggagctgttcaccggggtggtgcccatcctggtcgagctggacggcgacgtaaacggccacaagttcagcgtgtccggcgagggcgagggcgatgccacctacggcaagctgaccctgaagttcatctgcaccaccggcaagctgcccgtgccctggcccaccctcgtgaccaccctgacctacggcgtgcagtgcttcagccgctaccccgaccacatgaagcagcacgacttcttcaagtccgccatgcccgaaggctacgtccaggagcgcaccatcttcttcaaggacgacggcaactacaagacccgcgccgaggtgaagttcgagggcgacaccctggtgaaccgcatcgagctgaagggcatcgacttcaaggaggacggcaacatcctggggcacaagctggagtacaactacaacagccacaacgtctatatcatggccgacaagcagaagaacggcatcaaggtgaacttcaagatccgccacaacatcgaggacggcagcgtgcagctcgccgaccactaccagcagaacacccccatcggcgacggccccgtgctgctgcccgacaaccactacctgagcacccagtccgccctgagcaaagaccccaacgagaagcgcgatcacatggtcctgctggagttcgtgaccgccgccgggatcactctcggcatggacgagctgtacaagtccggccggactcagatctcgagctcaagcttcgaattcatggctagcctgcagatggtaacagtgggtcataacatagccttaattcaaccaggcttctcacttatgaattttgatggccaagttttcttctttggccagaaaggctggcctaagagatcctgtcctactggagtctttcattttgatataaaacaaaatcatctcaaactgaagcctgcaatcttctctaaagattcctgctacctcccacctcttcgttatccagctacttgctcatacaaaggcagcatagactctgacaagcatcaatatatcattcacggagggaaaacaccaaacaatgagctttccgataagatttatatcatgtctgtcgcttgcaagaataacaaaaaagttactttccgttgcacagagaaagacttagtaggagatgtccctgaacccagatacggccattccattgacgtggtgtatagtcgagggaaaagcatgggtgttctctttggaggacgttcatacatgccttctacccagagaaccacagaaaaatggaatagtgtagctgactgcctaccccatgttttcttgatagattttgaatttgggtgtgctacatcatatattctcccagaacttcaggatgggctgtcttttcatgtttctattgccagaaacgataccgtttatattttgggaggacactcacttgccagtaatatacgccctgctaacttgtatagaataagagtggaccttcccctgggtaccccagcagtgaattgcacagtcttgccaggaggaatctctgtctccagtgcaatcctcactcaaacaaacaatgatgaatttgttattgtgggtggttatcagctggaaaatcagaaaaggatggtctgcagccttgtctctctaggggacaacacgattgaaatcagtgagatggagactcctgactggacctcagatattaagcatagcaaaatatggtttggaagcaacatgggaaacgggactattttccttggcataccaggagacaataagcaggctatgtcagaagcattctatttctatactttgagatgctctgaagaggatttgagtgaagatcagaaaattgtctccaacagtcagacatcaacagaagatcctggggactccactccctttgaagactcagaggaattttgtttcagtgctgaagcaaccagttttgatggtgacgatgaatttgacacctacaatgaagatgatgaagatgacgagtctgtaaccggctactggataacatgttgccctacttgtgatgttgacatcaatacctgggttccgttctattcaacggagctcaataaacccgccatgatctattgttctcatggggatgggcactgggtacatgcccagtgcatggatttggaagaacgcacactcatccacttgtcagaaggaagcaacaagtattattgcaatgaacatgtacagatagcaagagcattgcaaactcccaaaagaaacccccccttacaaaaacctccaatgaaatccctccacaaaaaaggctctgggaaagtcttgactcctgccaagaaatccttccttagaagactgtttgattaatttagcaaaagcccctcagactcaggtatattgctctctgaatctactttcaatcataaacattattttgatttttgttactgaaatctctatgttatgttttagttatgtgaattaagtgctgttgtgatttattgttaagtataactattctaatgtgtgttttttaacatcttatccaggaatgtcttaaatgagaaatgttatacagttttccattaaggatatcgaattcctgcagcccgggggatccactagtctagtctagataactgatcataatcagccataccacatttgtagaggttttacttgctttaaaaaacctcccacacctccccctgaacctgaaacataaaatgaatgcaattgttgttgttaacttgtttattgcagcttataatggttacaaataaagcaatagcatcacaaatttcacaaataaagcatttttttcactgcattctagttgtggtttgtccaaactcatcaatgtatcttaacgcnnnntaagggtgggaaagaatatataaggtgggggtcttatgtagttttgtatctgttttgcagcagccgccgccgccatgagcaccaactcgtttgatggaagcattgtgagctcatatttgacaacgcgcatgcccccatgggccggggtgcgtcagaatgtgatgggctccagcattgatggtcgccccgtcctgcccgcaaactctactaccttgacctacgagaccgtgtctggaacgccgttggagactgcagcctccgccgccgcttcagccgctgcagccaccgcccgcgggattgtgactgactttgctttcctgagcccgcttgcaagcagtgcagcttcccgttcatccgcccgcgatgacaagttgacggctcttttggcacaattggattctttgacccgggaacttaatgtcgtttctcagcagctgttggatctgcgccagcaggtttctgccctgaaggcttcctcccctcccaatgcggtttaaaacataaataaaaaaccagactctgtttggatttggatcaagcaagtgtcttgctgtctttatttaggggttttgcgcgcgcggtaggcccgggaccagcggtctcggtcgttgagggtcctgtgtattttttccaggacgtggtaaaggtgactctggatgttcagatacatgggcataagcccgtctctggggtggaggtagcaccactgcagagcttcatgctgcggggtggtgttgtagatgatccagtcgtagcaggagcgctgggcgtggtgcctaaaaatgtctttcagtagcaagctgattgccaggggcaggcccttggtgtaagtgtttacaaagcggttaagctgggatgggtgcatacgtggggatatgagatgcatcttggactgtatttttaggttggctatgttcccagccatatccctccggggattcatgttgtgcagaaccaccagcacagtgtatccggtgcacttgggaaatttgtcatgtagcttagaaggaaatgcgtggaagaacttggagacgcccttgtgacctccaagattttccatgcattcgtccataatgatggcaatgggcccacgggcggcggcctgggcgaagatatttctgggatcactaacgtcatagttgtgttccaggatgagatcgtcataggccatttttacaaagcgcgggcggagggtgccagactgcggtataatggttccatccggcccaggggcgtagttaccctcacagatttgcatttcccacgctttgagttcagatggggggatcatgtctacctgcggggcgatgaagaaaacggtttccggggtaggggagatcagctgggaagaaagcaggttcctgagcagctgcgacttaccgcagccggtgggcccgtaaatcacacctattaccgggtgcaactggtagttaagagagctgcagctgccgtcatccctgagcaggggggccacttcgttaagcatgtccctgactcgcatgttttccctgaccaaatccgccagaaggcgctcgccgcccagcgatagcagttcttgcaaggaagcaaagtttttcaacggtttgagaccgtccgccgtaggcatgcttttgagcgtttgaccaagcagttccaggcggtcccacagctcggtcacctgctctacggcatctcgatccagcatatctcctcgtttcgcgggttggggcggctttcgctgtacggcagtagtcggtgctcgtccagacgggccagggtcatgtctttccacgggcgcagggtcctcgtcagcgtagtctgggtcacggtgaaggggtgcgctccgggctgcgcgctggccagggtgcgcttgaggctggtcctgctggtgctgaagcgctgccggtcttcgccctgcgcgtcggccaggtagcatttgaccatggtgtcatagtccagcccctccgcggcgtggcccttggcgcgcagcttgcccttggaggaggcgccgcacgaggggcagtgcagacttttgagggcgtagagcttgggcgcgagaaataccgattccggggagtaggcatccgcgccgcaggccccgcagacggtctcgcattccacgagccaggtgagctctggccgttcggggtcaaaaaccaggtttcccccatgctttttgatgcgtttcttacctctggtttccatgagccggtgtccacgctcggtgacgaaaaggctgtccgtgtccccgtatacagacttgagaggcctgtcctcgagcggtgttccgcggtcctcctcgtatagaaactcggaccactctgagacaaaggctcgcgtccaggccagcacgaaggaggctaagtgggaggggtagcggtcgttgtccactagggggtccactcgctccagggtgtgaagacacatgtcgccctcttcggcatcaaggaaggtgattggtttgtaggtgtaggccacgtgaccgggtgttcctgaaggggggctataaaagggggtgggggcgcgttcgtcctcactctcttccgcatcgctgtctgcgagggccagctgttggggtgagtactccctctgaaaagcgggcatgacttctgcgctaagattgtcagtttccaaaaacgaggaggatttgatattcacctggcccgcggtgatgcctttgagggtggccgcatccatctggtcagaaaagacaatctttttgttgtcaagcttggtggcaaacgacccgtagagggcgttggacagcaacttggcgatggagcgcagggtttggtttttgtcgcgatcggcgcgctccttggccgcgatgtttagctgcacgtattcgcgcgcaacgcaccgccattcgggaaagacggtggtgcgctcgtcgggcaccaggtgcacgcgccaaccgcggttgtgcagggtgacaaggtcaacgctggtggctacctctccgcgtaggcgctcgttggtccagcagaggcggccgcccttgcgcgagcagaatggcggtagggggtctagctgcgtctcgtccggggggtctgcgtccacggtaaagaccccgggcagcaggcgcgcgtcgaagtagtctatcttgcatccttgcaagtctagcgcctgctgccatgcgcgggcggcaagcgcgcgctcgtatgggttgagtgggggaccccatggcatggggtgggtgagcgcggaggcgtacatgccgcaaatgtcgtaaacgtagaggggctctctgagtattccaagatatgtagggtagcatcttccaccgcggatgctggcgcgcacgtaatcgtatagttcgtgcgagggagcgaggaggtcgggaccgaggttgctacgggcgggctgctctgctcggaagactatctgcctgaagatggcatgtgagttggatgatatggttggacgctggaagacgttgaagctggcgtctgtgagacctaccgcgtcacgcacgaaggaggcgtaggagtcgcgcagcttgttgaccagctcggcggtgacctgcacgtctagggcgcagtagtccagggtttccttgatgatgtcatacttatcctgtcccttttttttccacagctcgcggttgaggacaaactcttcgcggtctttccagtactcttggatcggaaacccgtcggcctccgaacggtaagagcctagcatgtagaactggttgacggcctggtaggcgcagcatcccttttctacgggtagcgcgtatgcctgcgcggccttccggagcgaggtgtgggtgagcgcaaaggtgtccctgaccatgactttgaggtactggtatttgaagtcagtgtcgtcgcatccgccctgctcccagagcaaaaagtccgtgcgctttttggaacgcggatttggcagggcgaaggtgacatcgttgaagagtatctttcccgcgcgaggcataaagttgcgtgtgatgcggaagggtcccggcacctcggaacggttgttaattacctgggcggcgagcacgatctcgtcaaagccgttgatgttgtggcccacaatgtaaagttccaagaagcgcgggatgcccttgatggaaggcaattttttaagttcctcgtaggtgagctcttcaggggagctgagcccgtgctctgaaagggcccagtctgcaagatgagggttggaagcgacgaatgagctccacaggtcacgggccattagcatttgcaggtggtcgcgaaaggtcctaaactggcgacctatggccattttttctggggtgatgcagtagaaggtaagcgggtcttgttcccagcggtcccatccaaggttcgcggctaggtctcgcgcggcagtcactagaggctcatctccgccgaacttcatgaccagcatgaagggcacgagctgcttcccaaaggcccccatccaagtataggtctctacatcgtaggtgacaaagagacgctcggtgcgaggatgcgagccgatcgggaagaactggatctcccgccaccaattggaggagtggctattgatgtggtgaaagtagaagtccctgcgacgggccgaacactcgtgctggcttttgtaaaaacgtgcgcagtactggcagcggtgcacgggctgtacatcctgcacgaggttgacctgacgaccgcgcacaaggaagcagagtgggaatttgagcccctcgcctggcgggtttggctggtggtcttctacttcggctgcttgtccttgaccgtctggctgctcgaggggagttacggtggatcggaccaccacgccgcgcgagcccaaagtccagatgtccgcgcgcggcggtcggagcttgatgacaacatcgcgcagatgggagctgtccatggtctggagctcccgcggcgtcaggtcaggcgggagctcctgcaggtttacctcgcatagacgggtcagggcgcgggctagatccaggtgatacctaatttccaggggctggttggtggcggcgtcgatggcttgcaagaggccgcatccccgcggcgcgactacggtaccgcgcggcgggcggtgggccgcgggggtgtccttggatgatgcatctaaaagcggtgacgcgggcgagcccccggaggtagggggggctccggacccgccgggagagggggcaggggcacgtcggcgccgcgcgcgggcaggagctggtgctgcgcgcgtaggttgctggcgaacgcgacgacgcggcggttgatctcctgaatctggcgcctctgcgtgaagacgacgggcccggtgagcttgagcctgaaagagagttcgacagaatcaatttcggtgtcgttgacggcggcctggcgcaaaatctcctgcacgtctcctgagttgtcttgataggcgatctcggccatgaactgctcgatctcttcctcctggagatctccgcgtccggctcgctccacggtggcggcgaggtcgttggaaatgcgggccatgagctgcgagaaggcgttgaggcctccctcgttccagacgcggctgtagaccacgcccccttcggcatcgcgggcgcgcatgaccacctgcgcgagattgagctccacgtgccgggcgaagacggcgtagtttcgcaggcgctgaaagaggtagttgagggtggtggcggtgtgttctgccacgaagaagtacataacccagcgtcgcaacgtggattcgttgatatcccccaaggcctcaaggcgctccatggcctcgtagaagtccacggcgaagttgaaaaactgggagttgcgcgccgacacggttaactcctcctccagaagacggatgagctcggcgacagtgtcgcgcacctcgcgctcaaaggctacaggggcctcttcttcttcttcaatctcctcttccataagggcctccccttcttcttcttctggcggcggtgggggaggggggacacggcggcgacgacggcgcaccgggaggcggtcgacaaagcgctcgatcatctccccgcggcgacggcgcatggtctcggtgacggcgcggccgttctcgcgggggcgcagttggaagacgccgcccgtcatgtcccggttatgggttggcggggggctgccatgcggcagggatacggcgctaacgatgcatctcaacaattgttgtgtaggtactccgccgccgagggacctgagcgagtccgcatcgaccggatcggaaaacctctcgagaaaggcgtctaaccagtcacagtcgcaaggtaggctgagcaccgtggcgggcggcagcgggcggcggtcggggttgtttctggcggaggtgctgctgatgatgtaattaaagtaggcggtcttgagacggcggatggtcgacagaagcaccatgtccttgggtccggcctgctgaatgcgcaggcggtcggccatgccccaggcttcgttttgacatcggcgcaggtctttgtagtagtcttgcatgagcctttctaccggcacttcttcttctccttcctcttgtcctgcatctcttgcatctatcgctgcggcggcggcggagtttggccgtaggtggcgccctcttcctcccatgcgtgtgaccccgaagcccctcatcggctgaagcagggctaggtcggcgacaacgcgctcggctaatatggcctgctgcacctgcgtgagggtagactggaagtcatccatgtccacaaagcggtggtatgcgcccgtgttgatggtgtaagtgcagttggccataacggaccagttaacggtctggtgacccggctgcgagagctcggtgtacctgagacgcgagtaagccctcgagtcaaatacgtagtcgttgcaagtccgcaccaggtactggtatcccaccaaaaagtgcggcggcggctggcggtagaggggccagcgtagggtggccggggctccgggggcgagatcttccaacataaggcgatgatatccgtagatgtacctggacatccaggtgatgccggcggcggtggtggaggcgcgcggaaagtcgcggacgcggttccagatgttgcgcagcggcaaaaagtgctccatggtcgggacgctctggccggtcaggcgcgcgcaatcgttgacgctctaccgtgcaaaaggagagcctgtaagcgggcactcttccgtggtctggtggataaattcgcaagggtatcatggcggacgaccggggttcgagccccgtatccggccgtccgccgtgatccatgcggttaccgcccgcgtgtcgaacccaggtgtgcgacgtcagacaacgggggagtgctccttttggcttccttccaggcgcggcggctgctgcgctagcttttttggccactggccgcgcgcagcgtaagcggttaggctggaaagcgaaagcattaagtggctcgctccctgtagccggagggttattttccaagggttgagtcgcgggacccccggttcgagtctcggaccggccggactgcggcgaacgggggtttgcctccccgtcatgcaagaccccgcttgcaaattcctccggaaacagggacgagccccttttttgcttttcccagatgcatccggtgctgcggcagatgcgcccccctcctcagcagcggcaagagcaagagcagcggcagacatgcagggcaccctcccctcctcctaccgcgtcaggaggggcgacatccgcggttgacgcggcagcagatggtgattacgaacccccgcggcgccgggcccggcactacctggacttggaggagggcgagggcctggcgcggctaggagcgccctctcctgagcggtacccaagggtgcagctgaagcgtgatacgcgtgaggcgtacgtgccgcggcagaacctgtttcgcgaccgcgagggagaggagcccgaggagatgcgggatcgaaagttccacgcagggcgcgagctgcggcatggcctgaatcgcgagcggttgctgcgcgaggaggactttgagcccgacgcgcgaaccgggattagtcccgcgcgcgcacacgtggcggccgccgacctggtaaccgcatacgagcagacggtgaaccaggagattaactttcaaaaaagctttaacaaccacgtgcgtacgcttgtggcgcgcgaggaggtggctataggactgatgcatctgtgggactttgtaagcgcgctggagcaaaacccaaatagcaagccgctcatggcgcagctgttccttatagtgcagcacagcagggacaacgaggcattcagggatgcgctgctaaacatagtagagcccgagggccgctggctgctcgatttgataaacatcctgcagagcatagtggtgcaggagcgcagcttgagcctggctgacaaggtggccgccatcaactattccatgcttagcctgggcaagttttacgcccgcaagatataccataccccttacgttcccatagacaaggaggtaaagatcgaggggttctacatgcgcatggcgctgaaggtgcttaccttgagcgacgacctgggcgtttatcgcaacgagcgcatccacaaggccgtgagcgtgagccggcggcgcgagctcagcgaccgcgagctgatgcacagcctgcaaagggccctggctggcacgggcagcggcgatagagaggccgagtcctactttgacgcgggcgctgacctgcgctgggccccaagccgacgcgccctggaggcagctggggccggacctgggctggcggtggcacccgcgcgcgctggcaacgtcggcggcgtggaggaatatgacgaggacgatgagtacgagccagaggacggcgagtactaagcggtgatgtttctgatcagatgatgcaagacgcaacggacccggcggtgcgggcggcgctgcagagccagccgtccggccttaactccacggacgactggcgccaggtcatggaccgcatcatgtcgctgactgcgcgcaatcctgacgcgttccggcagcagccgcaggccaaccggctctccgcaattctggaagcggtggtcccggcgcgcgcaaaccccacgcacgagaaggtgctggcgatcgtaaacgcgctggccgaaaacagggccatccggcccgacgaggccggcctggtctacgacgcgctgcttcagcgcgtggctcgttacaacagcggcaacgtgcagaccaacctggaccggctggtgggggatgtgcgcgaggccgtggcgcagcgtgagcgcgcgcagcagcagggcaacctgggctccatggttgcactaaacgccttcctgagtacacagcccgccaacgtgccgcggggacaggaggactacaccaactttgtgagcgcactgcggctaatggtgactgagacaccgcaaagtgaggtgtaccagtctgggccagactattttttccagaccagtagacaaggcctgcagaccgtaaacctgagccaggctttcaaaaacttgcaggggctgtggggggtgcgggctcccacaggcgaccgcgcgaccgtgtctagcttgctgacgcccaactcgcgcctgttgctgctgctaatagcgcccttcacggacagtggcagcgtgtcccgggacacatacctaggtcacttgctgacactgtaccgcgaggccataggtcaggcgcatgtggacgagcatactttccaggagattacaagtgtcagccgcgcgctggggcaggaggacacgggcagcctggaggcaaccctaaactacctgctgaccaaccggcggcagaagatcccctcgttgcacagtttaaacagcgaggaggagcgcattttgcgctacgtgcagcagagcgtgagccttaacctgatgcgcgacggggtaacgcccagcgtggcgctggacatgaccgcgcgcaacatggaaccgggcatgtatgcctcaaaccggccgtttatcaaccgcctaatggactacttgcatcgcgcggccgccgtgaaccccgagtatttcaccaatgccatcttgaacccgcactggctaccgccccctggtttctacaccgggggattcgaggtgcccgagggtaacgatggattcctctgggacgacatagacgacagcgtgttttccccgcaaccgcagaccctgctagagttgcaacagcgcgagcaggcagaggcggcgctgcgaaaggaaagcttccgcaggccaagcagcttgtccgatctaggcgctgcggccccgcggtcagatgctagtagcccatttccaagcttgatagggtctcttaccagcactcgcaccacccgcccgcgcctgctgggcgaggaggagtacctaaacaactcgctgctgcagccgcagcgcgaaaaaaacctgcctccggcatttcccaacaacgggatagagagcctagtggacaagatgagtagatggaagacgtacgcgcaggagcacagggacgtgccaggcccgcgcccgcccacccgtcgtcaaaggcacgaccgtcagcggggtctggtgtgggaggacgatgactcggcagacgacagcagcgtcctggatttgggagggagtggcaacccgtttgcgcaccttcgccccaggctggggagaatgttttaaaaaaaaaaaagcatgatgcaaaataaaaaactcaccaaggccatggcaccgagcgttggttttcttgtattccccttagtatgcggcgcgcggcgatgtatgaggaaggtcctcctccctcctacgagagtgtggtgagcgcggcgccagtggcggcggcgctgggttctcccttcgatgctcccctggacccgccgtttgtgcctccgcggtacctgcggcctaccggggggagaaacagcatccgttactctgagttggcacccctattcgacaccacccgtgtgtacctggtggacaacaagtcaacggatgtggcatccctgaactaccagaacgaccacagcaactttctgaccacggtcattcaaaacaatgactacagcccgggggaggcaagcacacagaccatcaatcttgacgaccggtcgcactggggcggcgacctgaaaaccatcctgcataccaacatgccaaatgtgaacgagttcatgtttaccaataagtttaaggcgcgggtgatggtgtcgcgcttgcctactaaggacaatcaggtggagctgaaatacgagtgggtggagttcacgctgcccgagggcaactactccgagaccatgaccatagaccttatgaacaacgcgatcgtggagcactacttgaaagtgggcagacagaacggggttctggaaagcgacatcggggtaaagtttgacacccgcaacttcagactggggtttgaccccgtcactggtcttgtcatgcctggggtatatacaaacgaagccttccatccagacatcattttgctgccaggatgcggggtggacttcacccacagccgcctgagcaacttgttgggcatccgcaagcggcaacccttccaggagggctttaggatcacctacgatgatctggagggtggtaacattcccgcactgttggatgtggacgcctaccaggcgagcttgaaagatgacaccgaacagggcgggggtggcgcaggcggcagcaacagcagtggcagcggcgcggaagagaactccaacgcggcagccgcggcaatgcagccggtggaggacatgaacgatcatgccattcgcggcgacacctttgccacacgggctgaggagaagcgcgctgaggccgaagcagcggccgaagctgccgcccccgctgcgcaacccgaggtcgagaagcctcagaagaaaccggtgatcaaacccctgacagaggacagcaagaaacgcagttacaacctaataagcaatgacagcaccttcacccagtaccgcagctggtaccttgcatacaactacggcgaccctcagaccggaatccgctcatggaccctgctttgcactcctgacgtaacctgcggctcggagcaggtctactggtcgttgccagacatgatgcaagaccccgtgaccttccgctccacgcgccagatcagcaactttccggtggtgggcgccgagctgttgcccgtgcactccaagagcttctacaacgaccaggccgtctactcccaactcatccgccagtttacctctctgacccacgtgttcaatcgctttcccgagaaccagattttggcgcgcccgccagcccccaccatcaccaccgtcagtgaaaacgttcctgctctcacagatcacgggacgctaccgctgcgcaacagcatcggaggagtccagcgagtgaccattactgacgccagacgccgcacctgcccctacgtttacaaggccctgggcatagtctcgccgcgcgtcctatcgagccgcactttttgagcaagcatgtccatccttatatcgcccagcaataacacaggctggggcctgcgcttcccaagcaagatgtttggcggggccaagaagcgctccgaccaacacccagtgcgcgtgcgcgggcactaccgcgcgccctggggcgcgcacaaacgcggccgcactgggcgcaccaccgtcgatgacgccatcgacgcggtggtggaggaggcgcgcaactacacgcccacgccgccaccagtgtccacagtggacgcggccattcagaccgtggtgcgcggagcccggcgctatgctaaaatgaagagacggcggaggcgcgtagcacgtcgccaccgccgccgacccggcactgccgcccaacgcgcggcggcggccctgcttaaccgcgcacgtcgcaccggccgacgggcggccatgcgggccgctcgaaggctggccgcgggtattgtcactgtgccccccaggtccaggcgacgagcggccgccgcagcagccgcggccattagtgctatgactcagggtcgcaggggcaacgtgtattgggtgcgcgactcggttagcggcctgcgcgtgcccgtgcgcacccgccccccgcgcaactagattgcaagaaaaaactacttagactcgtactgttgtatgtatccagcggcggcggcgcgcaacgaagctatgtccaagcgcaaaatcaaagaagagatgctccaggtcatcgcgccggagatctatggccccccgaagaaggaagagcaggattacaagccccgaaagctaaagcgggtcaaaaagaaaaagaaagatgatgatgatgaacttgacgacgaggtggaactgctgcacgctaccgcgcccaggcgacgggtacagtggaaaggtcgacgcgtaaaacgtgttttgcgacccggcaccaccgtagtctttacgcccggtgagcgctccacccgcacctacaagcgcgtgtatgatgaggtgtacggcgacgaggacctgcttgagcaggccaacgagcgcctcggggagtttgcctacggaaagcggcataaggacatgctggcgttgccgctggacgagggcaacccaacacctagcctaaagcccgtaacactgcagcaggtgctgcccgcgcttgcaccgtccgaagaaaagcgcggcctaaagcgcgagtctggtgacttggcacccaccgtgcagctgatggtacccaagcgccagcgactggaagatgtcttggaaaaaatgaccgtggaacctgggctggagcccgaggtccgcgtgcggccaatcaagcaggtggcgccgggactgggcgtgcagaccgtggacgttcagatacccactaccagtagcaccagtattgccaccgccacagagggcatggagacacaaacgtccccggttgcctcagcggtggcggatgccgcggtgcaggcggtcgctgcggccgcgtccaagacctctacggaggtgcaaacggacccgtggatgtttcgcgtttcagccccccggcgcccgcgcggttcgaggaagtacggcgccgccagcgcgctactgcccgaatatgccctacatccttccattgcgcctacccccggctatcgtggctacacctaccgccccagaagacgagcaactacccgacgccgaaccaccactggaacccgccgccgccgtcgccgtcgccagcccgtgctggccccgatttccgtgcgcagggtggctcgcgaaggaggcaggaccctggtgctgccaacagcgcgctaccaccccagcatcgtttaaaagccggtctttgtggttcttgcagatatggccctcacctgccgcctccgtttcccggtgccgggattccgaggaagaatgcaccgtaggaggggcatggccggccacggcctgacgggcggcatgcgtcgtgcgcaccaccggcggcggcgcgcgtcgcaccgtcgcatgcgcggcggtatcctgcccctccttattccactgatcgccgcggcgattggcgccgtgcccggaattgcatccgtggccttgcaggcgcagagacactgattaaaaacaagttgcatgtggaaaaatcaaaataaaaagtctggactctcacgctcgcttggtcctgtaactattttgtagaatggaagacatcaactttgcgtctctggccccgcgacacggctcgcgcccgttcatgggaaactggcaagatatcggcaccagcaatatgagcggtggcgccttcagctggggctcgctgtggagcggcattaaaaatttcggttccaccgttaagaactatggcagcaaggcctggaacagcagcacaggccagatgctgagggataagttgaaagagcaaaatttccaacaaaaggtggtagatggcctggcctctggcattagcggggtggtggacctggccaaccaggcagtgcaaaataagattaacagtaagcttgatccccgccctcccgtagaggagcctccaccggccgtggagacagtgtctccagaggggcgtggcgaaaagcgtccgcgccccgacagggaagaaactctggtgacgcaaatagacgagcctccctcgtacgaggaggcactaaagcaaggcctgcccaccacccgtcccatcgcgcccatggctaccggagtgctgggccagcacacacccgtaacgctggacctgcctccccccgccgacacccagcagaaacctgtgctgccaggcccgaccgccgttgttgtaacccgtcctagccgcgcgtccctgcgccgcgccgccagcggtccgcgatcgttgcggcccgtagccagtggcaactggcaaagcacactgaacagcatcgtgggtctgggggtgcaatccctgaagcgccgacgatgcttctgaatagctaacgtgtcgtatgtgtgtcatgtatgcgtccatgtcgccgccagaggagctgctgagccgccgcgcgcccgctttccaagatggctaccccttcgatgatgccgcagtggtcttacatgcacatctcgggccaggacgcctcggagtacctgagccccgggctggtgcagtttgcccgcgccaccgagacgtacttcagcctgaataacaagtttagaaaccccacggtggcgcctacgcacgacgtgaccacagaccggtcccagcgtttgacgctgcggttcatccctgtggaccgtgaggatactgcgtactcgtacaaggcgcggttcaccctagctgtgggtgataaccgtgtgctggacatggcttccacgtactttgacatccgcggcgtgctggacaggggccctacttttaagccctactctggcactgcctacaacgccctggctcccaagggtgccccaaatccttgcgaatgggatgaagctgctactgctcttgaaataaacctagaagaagaggacgatgacaacgaagacgaagtagacgagcaagctgagcagcaaaaaactcacgtatttgggcaggcgccttattctggtataaatattacaaaggagggtattcaaataggtgtcgaaggtcaaacacctaaatatgccgataaaacatttcaacctgaacctcaaataggagaatctcagtggtacgaaactgaaattaatcatgcagctgggagagtccttaaaaagactaccccaatgaaaccatgttacggttcatatgcaaaacccacaaatgaaaatggagggcaaggcattcttgtaaagcaacaaaatggaaagctagaaagtcaagtggaaatgcaatttttctcaactactgaggcgaccgcaggcaatggtgataacttgactcctaaagtggtattgtacagtgaagatgtagatatagaaaccccagacactcatatttcttacatgcccactattaaggaaggtaactcacgagaactaatgggccaacaatctatgcccaacaggcctaattacattgcttttagggacaattttattggtctaatgtattacaacagcacgggtaatatgggtgttctggcgggccaagcatcgcagttgaatgctgttgtagatttgcaagacagaaacacagagctttcataccagcttttgcttgattccattggtgatagaaccaggtacttttctatgtggaatcaggctgttgacagctatgatccagatgttagaattattgaaaatcatggaactgaagatgaacttccaaattactgctttccactgggaggtgtgattaatacagagactcttaccaaggtaaaacctaaaacaggtcaggaaaatggatgggaaaaagatgctacagaattttcagataaaaatgaaataagagttggaaataattttgccatggaaatcaatctaaatgccaacctgtggagaaatttcctgtactccaacatagcgctgtatttgcccgacaagctaaagtacagtccttccaacgtaaaaatttctgataacccaaacacctacgactacatgaacaagcgagtggtggctcccgggttagtggactgctacattaaccttggagcacgctggtcccttgactatatggacaacgtcaacccatttaaccaccaccgcaatgctggcctgcgctaccgctcaatgttgctgggcaatggtcgctatgtgcccttccacatccaggtgcctcagaagttctttgccattaaaaacctccttctcctgccgggctcatacacctacgagtggaacttcaggaaggatgttaacatggttctgcagagctccctaggaaatgacctaagggttgacggagccagcattaagtttgatagcatttgcctttacgccaccttcttccccatggcccacaacaccgcctccacgcttgaggccatgcttagaaacgacaccaacgaccagtcctttaacgactatctctccgccgccaacatgctctaccctatacccgccaacgctaccaacgtgcccatatccatcccctcccgcaactgggcggctttccgcggctgggccttcacgcgccttaagactaaggaaaccccatcactgggctcgggctacgacccttattacacctactctggctctataccctacctagatggaaccttttacctcaaccacacctttaagaaggtggccattacctttgactcttctgtcagctggcctggcaatgaccgcctgcttacccccaacgagtttgaaattaagcgctcagttgacggggagggttacaacgttgcccagtgtaacatgaccaaagactggttcctggtacaaatgctagctaactacaacattggctaccagggcttctatatcccagagagctacaaggaccgcatgtactccttctttagaaacttccagcccatgagccgtcaggtggtggatgatactaaatacaaggactaccaacaggtgggcatcctacaccaacacaacaactctggatttgttggctaccttgcccccaccatgcgcgaaggacaggcctaccctgctaacttcccctatccgcttataggcaagaccgcagttgacagcattacccagaaaaagtttctttgcgatcgcaccctttggcgcatcccattctccagtaactttatgtccatgggcgcactcacagacctgggccaaaaccttctctacgccaactccgcccacgcgctagacatgacttttgaggtggatcccatggacgagcccacccttctttatgttttgtttgaagtctttgacgtggtccgtgtgcaccggccgcaccgcggcgtcatcgaaaccgtgtacctgcgcacgcccttctcggccggcaacgccacaacataaagaagcaagcaacatcaacaacagctgccgccatgggctccagtgagcaggaactgaaagccattgtcaaagatcttggttgtgggccatattttttgggcacctatgacaagcgctttccaggctttgtttctccacacaagctcgcctgcgccatagtcaatacggccggtcgcgagactgggggcgtacactggatggcctttgcctggaacccgcactcaaaaacatgctacctctttgagccctttggcttttctgaccagcgactcaagcaggtttaccagtttgagtacgagtcactcctgcgccgtagcgccattgcttcttcccccgaccgctgtataacgctggaaaagtccacccaaagcgtacaggggcccaactcggccgcctgtggactattctgctgcatgtttctccacgcctttgccaactggccccaaactcccatggatcacaaccccaccatgaaccttattaccggggtacccaactccatgctcaacagtccccaggtacagcccaccctgcgtcgcaaccaggaacagctctacagcttcctggagcgccactcgccctacttccgcagccacagtgcgcagattaggagcgccacttctttttgtcacttgaaaaacatgtaaaaataatgtactagagacactttcaataaaggcaaatgcttttatttgtacactctcgggtgattatttacccccacccttgccgtctgcgccgtttaaaaatcaaaggggttctgccgcgcatcgctatgcgccactggcagggacacgttgcgatactggtgtttagtgctccacttaaactcaggcacaaccatccgcggcagctcggtgaagttttcactccacaggctgcgcaccatcaccaacgcgtttagcaggtcgggcgccgatatcttgaagtcgcagttggggcctccgccctgcgcgcgcgagttgcgatacacagggttgcagcactggaacactatcagcgccgggtggtgcacgctggccagcacgctcttgtcggagatcagatccgcgtccaggtcctccgcgttgctcagggcgaacggagtcaactttggtagctgccttcccaaaaagggcgcgtgcccaggctttgagttgcactcgcaccgtagtggcatcaaaaggtgaccgtgcccggtctgggcgttaggatacagcgcctgcataaaagccttgatctgcttaaaagccacctgagcctttgcgccttcagagaagaacatgccgcaagacttgccggaaaactgattggccggacaggccgcgtcgtgcacgcagcaccttgcgtcggtgttggagatctgcaccacatttcggccccaccggttcttcacgatcttggccttgctagactgctccttcagcgcgcgctgcccgttttcgctcgtcacatccatttcaatcacgtgctccttatttatcataatgcttccgtgtagacacttaagctcgccttcgatctcagcgcagcggtgcagccacaacgcgcagcccgtgggctcgtgatgcttgtaggtcacctctgcaaacgactgcaggtacgcctgcaggaatcgccccatcatcgtcacaaaggtcttgttgctggtgaaggtcagctgcaacccgcggtgctcctcgttcagccaggtcttgcatacggccgccagagcttccacttggtcaggcagtagtttgaagttcgcctttagatcgttatccacgtggtacttgtccatcagcgcgcgcgcagcctccatgcccttctcccacgcagacacgatcggcacactcagcgggttcatcaccgtaatttcactttccgcttcgctgggctcttcctcttcctcttgcgtccgcataccacgcgccactgggtcgtcttcattcagccgccgcactgtgcgcttacctcctttgccatgcttgattagcaccggtgggttgctgaaacccaccatttgtagcgccacatcttctctttcttcctcgctgtccacgattacctctggtgatggcgggcgctcgggcttgggagaagggcgcttctttttcttcttgggcgcaatggccaaatccgccgccgaggtcgatggccgcgggctgggtgtgcgcggcaccagcgcgtcttgtgatgagtcttcctcgtcctcggactcgatacgccgcctcatccgcttttttgggggcgcccggggaggcggcggcgacggggacggggacgacacgtcctccatggttgggggacgtcgcgccgcaccgcgtccgcgctcgggggtggtttcgcgctgctcctcttcccgactggccatttccttctcctataggcagaaaaagatcatggagtcagtcgagaagaaggacagcctaaccgccccctctgagttcgccaccaccgcctccaccgatgccgccaacgcgcctaccaccttccccgtcgaggcacccccgcttgaggaggaggaagtgattatcgagcaggacccaggttttgtaagcgaagacgacgaggaccgctcagtaccaacagaggataaaaagcaagaccaggacaacgcagaggcaaacgaggaacaagtcgggcggggggacgaaaggcatggcgactacctagatgtgggagacgacgtgctgttgaagcatctgcagcgccagtgcgccattatctgcgacgcgttgcaagagcgcagcgatgtgcccctcgccatagcggatgtcagccttgcctacgaacgccacctattctcaccgcgcgtaccccccaaacgccaagaaaacggcacatgcgagcccaacccgcgcctcaacttctaccccgtatttgccgtgccagaggtgcttgccacctatcacatctttttccaaaactgcaagatacccctatcctgccgtgccaaccgcagccgagcggacaagcagctggccttgcggcagggcgctgtcatacctgatatcgcctcgctcaacgaagtgccaaaaatctttgagggtcttggacgcgacgagaagcgcgcggcaaacgctctgcaacaggaaaacagcgaaaatgaaagtcactctggagtgttggtggaactcgagggtgacaacgcgcgcctagccgtactaaaacgcagcatcgaggtcacccactttgcctacccggcacttaacctaccccccaaggtcatgagcacagtcatgagtgagctgatcgtgcgccgtgcgcagcccctggagagggatgcaaatttgcaagaacaaacagaggagggcctacccgcagttggcgacgagcagctagcgcgctggcttcaaacgcgcgagcctgccgacttggaggagcgacgcaaactaatgatggccgcagtgctcgttaccgtggagcttgagtgcatgcagcggttctttgctgacccggagatgcagcgcaagctagaggaaacattgcactacacctttcgacagggctacgtacgccaggcctgcaagatctccaacgtggagctctgcaacctggtctcctaccttggaattttgcacgaaaaccgccttgggcaaaacgtgcttcattccacgctcaagggcgaggcgcgccgcgactacgtccgcgactgcgtttacttatttctatgctacacctggcagacggccatgggcgtttggcagcagtgcttggaggagtgcaacctcaaggagctgcagaaactgctaaagcaaaacttgaaggacctatggacggccttcaacgagcgctccgtggccgcgcacctggcggacatcattttccccgaacgcctgcttaaaaccctgcaacagggtctgccagacttcaccagtcaaagcatgttgcagaactttaggaactttatcctagagcgctcaggaatcttgcccgccacctgctgtgcacttcctagcgactttgtgcccattaagtaccgcgaatgccctccgccgctttggggccactgctaccttctgcagctagccaactaccttgcctaccactctgacataatggaagacgtgagcggtgacggtctactggagtgtcactgtcgctgcaacctatgcaccccgcaccgctccctggtttgcaattcgcagctgcttaacgaaagtcaaattatcggtacctttgagctgcagggtccctcgcctgacgaaaagtccgcggctccggggttgaaactcactccggggctgtggacgtcggcttaccttcgcaaatttgtacctgaggactaccacgcccacgagattaggttctacgaagaccaatcccgcccgccaaatgcggagcttaccgcctgcgtcattacccagggccacattcttggccaattgcaagccatcaacaaagcccgccaagagtttctgctacgaaagggacggggggtttacttggacccccagtccggcgaggagctcaacccaatccccccgccgccgcagccctatcagcagcagccgcgggcccttgcttcccaggatggcacccaaaaagaagctgcagctgccgccgccacccacggacgaggaggaatactgggacagtcaggcagaggaggttttggacgaggaggaggaggacatgatggaagactgggagagcctagacgaggaagcttccgaggtcgaagaggtgtcagacgaaacaccgtcaccctcggtcgcattcccctcgccggcgccccagaaatcggcaaccggttccagcatggctacaacctccgctcctcaggcgccgccggcactgcccgttcgccgacccaaccgtagatgggacaccactggaaccagggccggtaagtccaagcagccgccgccgttagcccaagagcaacaacagcgccaaggctaccgctcatggcgcgggcacaagaacgccatagttgcttgcttgcaagactgtgggggcaacatctccttcgcccgccgctttcttctctaccatcacggcgtggccttcccccgtaacatcctgcattactaccgtcatctctacagcccatactgcaccggcggcagcggcagcggcagcaacagcagcggccacacagaagcaaaggcgaccggatagcaagactctgacaaagcccaagaaatccacagcggcggcagcagcaggaggaggagcgctgcgtctggcgcccaacgaacccgtatcgacccgcgagcttagaaacaggatttttcccactctgtatgctatatttcaacagagcaggggccaagaacaagagctgaaaataaaaaacaggtctctgcgatccctcacccgcagctgcctgtatcacaaaagcgaagatcagcttcggcgcacgctggaagacgcggaggctctcttcagtaaatactgcgcgctgactcttaaggactagtttcgcgccctttctcaaatttaagcgcgaaaactacgtcatctccagcggccacacccggcgccagcacctgtcgtcagcgccattatgagcaaggaaattcccacgccctacatgtggagttaccagccacaaatgggacttgcggctggagctgcccaagactactcaacccgaataaactacatgagcgcgggaccccacatgatatcccgggtcaacggaatccgcgcccaccgaaaccgaattctcttggaacaggcggctattaccaccacacctcgtaataaccttaatccccgtagttggcccgctgccctggtgtaccaggaaagtcccgctcccaccactgtggtacttcccagagacgcccaggccgaagttcagatgactaactcaggggcgcagcttgcgggcggctttcgtcacagggtgcggtcgcccgggcagggtataactcacctgacaatcagagggcgaggtattcagctcaacgacgagtcggtgagctcctcgcttggtctccgtccggacgggacatttcagatcggcggcgccggccgtccttcattcacgcctcgtcaggcaatcctaactctgcagacctcgtcctctgagccgcgctctggaggcattggaactctgcaatttattgaggagtttgtgccatcggtctactttaaccccttctcgggacctcccggccactatccggatcaatttattcctaactttgacgcggtaaaggactcggcggacggctacgactgaatgttaagtggagaggcagagcaactgcgcctgaaacacctggtccactgtcgccgccacaagtgctttgcccgcgactccggtgagttttgctactttgaattgcccgaggatcatatcgagggcccggcgcacggcgtccggcttaccgcccagggagagcttgcccgtagcctgattcgggagtttacccagcgccccctgctagttgagcgggacaggggaccctgtgttctcactgtgatttgcaactgtcctaaccttggattacatcaagatcctctagttataactagagtacccggggatcttattccctttaactaataaaaaaaaataataaagcatcacttacttaaaatcagttagcaaatttctgtccagtttattcagcagcacctccttgccctcctcccagctctggtattgcagcttcctcctggctgcaaactttctccacaatctaaatggaatgtcagtttcctcctgttcctgtccatccgcacccactatcttcatgttgttgcagatgaagcgcgcaagaccgtctgaagataccttcaaccccgtgtatccatatgacacggaaaccggtcctccaactgtgccttttcttactcctccctttgtatcccccaatgggtttcaagagagtccccctggggtactctctttgcgcctatccgaacctctagttacctccaatggcatgcttgcgctcaaaatgggcaacggcctctctctggacgaggccggcaaccttacctcccaaaatgtaaccactgtgagcccacctctcaaaaaaaccaagtcaaacataaacctggaaatatctgcacccctcacagttacctcagaagccctaactgtggctgccgccgcacctctaatggtcgcgggcaacacactcaccatgcaatcacaggccccgctaaccgtgcacgactccaaacttagcattgccacccaaggacccctcacagtgtcagaaggaaagctagccctgcaaacatcaggccccctcaccaccaccgatagcagtacccttactatcactgcctcaccccctctaactactgccactggtagcttgggcattgacttgaaagagcccatttatacacaaaatggaaaactaggactaaagtacggggctcctttgcatgtaacagacgacctaaacactttgaccgtagcaactggtccaggtgtgactattaataatacttccttgcaaactaaagttactggagccttgggttttgattcacaaggcaatatgcaacttaatgtagcaggaggactaaggattgattctcaaaacagacgccttatacttgatgttagttatccgtttgatgctcaaaaccaactaaatctaagactaggacagggccctctttttataaactcagcccacaacttggatattaactacaacaaaggcctttacttgtttacagcttcaaacaattccaaaaagcttgaggttaacctaagcactgccaaggggttgatgtttgacgctacagccatagccattaatgcaggagatgggcttgaatttggttcacctaatgcaccaaacacaaatcccctcaaaacaaaaattggccatggcctagaatttgattcaaacaaggctatggttcctaaactaggaactggccttagttttgacagcacaggtgccattacagtaggaaacaaaaataatgataagctaactttgtggaccacaccagctccatctcctaactgtagactaaatgcagagaaagatgctaaactcactttggtcttaacaaaatgtggcagtcaaatacttgctacagtttcagttttggctgttaaaggcagtttggctccaatatctggaacagttcaaagtgctcatcttattataagatttgacgaaaatggagtgctactaaacaattccttcctggacccagaatattggaactttagaaatggagatcttactgaaggcacagcctatacaaacgctgttggatttatgcctaacctatcagcttatccaaaatctcacggtaaaactgccaaaagtaacattgtcagtcaagtttacttaaacggagacaaaactaaacctgtaacactaaccattacactaaacggtacacaggaaacaggagacacaactccaagtgcatactctatgtcattttcatgggactggtctggccacaactacattaatgaaatatttgccacatcctcttacactttttcatacattgcccaagaataaagaatcgtttgtgttatgtttcaacgtgtttatttttcaattgcagaaaatttcaagtcatttttcattcagtagtatagccccaccaccacatagcttatacagatcaccgtaccttaatcaaactcacagaaccctagtattcaacctgccacctccctcccaacacacagagtacacagtcctttctccccggctggccttaaaaagcatcatatcatgggtaacagacatattcttaggtgttatattccacacggtttcctgtcgagccaaacgctcatcaagtgatattaataaactccccgggcagctcacttaagttcatgtcgctgtccagctgctgagccacaggctgctgtccaacttgcggttgcttaacgggcggcgaaggagaagtccacgcctacatggggggagagtcataatcgtgcatcaggatagggcggtggtgctgcagcagcgcgcgaataaactgctgccgccgccgctccgtcctgcaggaatacaacatggcagtggtctcctcagcgatgattcgcaccgcccgcagcataaggcgcttgtcctccgggcacagcagcgcaccctgatctcacttaaatcagcacagtaactgcagcacagcaccacaatattgttcaaaatcccacagtgcaaggcgctgtatccaaagctcatggcggggaccacagaacccacgtggccatcataccacaagcgcaggtagattaagtggcgacccctcataaacacgctggacataaacattacctcttttggcatgttgtaattcaccacctcccggtaccatataaacctctgattaaacatggcgccatccaccaccatcctaaaccagctggccaaaacctgccccgccgggntatacactgcagggaaccgggacttggacaatgacaagtgggagagcccaggactcgtaaccatggatcatcatgctcgtcatgatatcaatgttggcacaacacaggcacacgtgcatacacttcctcaggattacaagctcctcccgcgttagaaccatatcccagggaacaacccattcctgaatcagcgtaaatcccacactgcagggaagacctcgcacgtaactcacgttgtgcattgtcaaagtgttacattcgggcagcagcggatgatcctccagtatggtagcgcgggtttctgtctcaaaaggaggtagacgatccctactgtacggagtgcgccgagacaaccgagatcgtgttggtcgtagtgtcatgccaaatggaacgccggacgtagtcatatttcctgaagcaaaaccaggtgcgggcgtgacaaacagatctgcgtctccggtctcgccgcttagatcgctctgtgtagtagttgtagtatatccactctctcaaagcatccaggcgccccctggcttcgggttctatgtaaactccttcatgcgccgctgccctgataacatccaccaccgcagaataagccacacccagccaacctacacattcgttctgcgagtcacacacgggaggagcgggaagagctggaagaaccatgtttttttttttattccaaaagattatccaaaacctcaaaatgaagatctattaagtgaacgcgctcccctccggtggcgtggtcaaactctacagccaaagaacagataatggcatttgtaagatgttgcacaatggcttccaaaaggcaaacggccctcacgtccaagtggacgtaaaggctaaacccttcagggtgaatctcctctataaacattccagcaccttcaaccatgcccaaataattctcatctcgccaccttctcaatatatctctaagcaaatcccgaatatttaagtccgggccattgtaaaaaatttggctccagagcgccctccaccttcagcctcaagcagcgaatcatgattgcaaaaattcaggttcctcacagacctgtataagattcaaaagcggaacattaacaaaaataccgcgatcccgtaggtcccttcgcagggccagctgaacataatcgtgcaggtctgcacggaccagcgcggccacttccccgccaggaaccatgacaaaagaacccacactgattatgacacgcatactcggagctatgctaaccagcgtagccccgatgtaagcttgttgcatgggcggcgatataaaatgcaaggtgctgctcaaaaaatcaggcaaagcctcgcgcaaaaaagaaagcacatcgtagtcatgctcatgcagataaaggcaggtaagctccggaaccaccacagaaaaagacaccatttttctctcaaacatgtctgcgggtttctgcataaacacaaaataaaataacaaaaaaacatttaaacattagaagcctgtcttacaacaggaaaaacaacccttataagcataagacggactacggccatgccggcgtgaccgtaaaaaaactggtcaccgtgattaaaaagcaccaccgacagctcctcggtcagtccggagtcataatgtaagactcggtaaacacatcaggttgattcacatcggtcagtgttaaaaagcgaccgaaatagccngggggaatacaatacccgcaggcgtagagacaacattacagcccccataggaggtataacaaaattaataggagagaaaaacacataaacacctgaaaaaccctcctgcctaggcaaaatagcaccctcccgctccagaacaacatacagcgcttccacagcggcagccataacagtcagccttaccagtaaaaaagaaaacctattaaaaaaacaccactcgacacggcaccagctcaatcagtcacagtgtaaaaaagggccaagtgcagagcgagtatatataggactaaaaaatgacggtaacggttaaagtccacaaaaaacacccagaaaaccgcacgcgaacctacgcccagaaacgaaagccaaaaaacccacaacttcctcaaatcgtcacttccgttttcccacgttacgtcacttcccattttaagaaaactacaattcccaacacatacaagttactccgccctaaaacctacgtcacccgccccgttcccacgccccgcgccacgtcacaaactccaccccctcattatcatattggcttcaatccaaaataaggtatattattgatgatg

SEQ ID NO: 56 - DNA, 38203 bp, Artificial Sequence; identical to SEQ ID NO: 55
  Made in a laboratory from synthetic material
  misc_feature (1)...(38203): n = A,T,C or G

SEQ ID NO: 57 - DNA, 31 bp, Artificial Sequence
  Made in a laboratory from synthetic material
gactctagagcagctccaaagatggcatgcg

SEQ ID NO: 58 - DNA, 26 bp, Artificial Sequence
  Made in a laboratory from synthetic material
gtttgaattccaccttggtcccttgg

SEQ ID NO: 59 - DNA, 22 bp, Artificial Sequence
  Made in a laboratory from synthetic material
cctgctctggagataaattggg

SEQ ID NO: 60 - DNA, 20 bp, Artificial Sequence
  Made in a laboratory from synthetic material
ctgctgtcccacgcctgaca

SEQ ID NO: 61 - DNA, 29 bp, Artificial Sequence
  Made in a laboratory from synthetic material
ccatcgatgcctacctgcagccgccgccc

SEQ ID NO: 62 - DNA, 26 bp, Artificial Sequence
  Made in a laboratory from synthetic material
cgggatccgaggctctatactataga

SEQ ID NO: 63 - DNA, 6379 bp, Artificial Sequence
  Made in a laboratory from synthetic material
gacggatcgggagatctcccgatcccctatggtcgactctcagtacaatctgctctgatgccgcatagttaagccagtatctgctccctgcttgtgtgttggaggtcgctgagtagtgcgcgagcaaaatttaagctacaacaaggcaaggcttgaccgacaattgcatgaagaatctgcttagggttaggcgttttgcgctgcttcgcgatgtacgggccagatatacgcgttgacattgattattgactagttattaatagtaatcaattacggggtcattagttcatagcccatatatggagttccgcgttacataacttacggtaaatggcccgcctggctgaccgcccaacgacccccgcccattgacgtcaataatgacgtatgttcccatagtaacgccaatagggactttccattgacgtcaatgggtggactatttacggtaaactgcccacttggcagtacatcaagtgtatcatatgccaagtacgccccctattgacgtcaatgacggtaaatggcccgcctggcattatgcccagtacatgaccttatgggactttcctacttggcagtacatctacgtattagtcatcgctattaccatggtgatgcggttttggcagtacatcaatgggcgtggatagcggtttgactcacggggatttccaagtctccaccccattgacgtcaatgggagtttgttttggcaccaaaatcaacgggactttccaaaatgtcgtaacaactccgccccattgacgcaaatgggcggtaggcgtgtacggtgggaggtctatataagcagagctctctggctaactagagaacccactgcttactggcttatcgaaattaatacgactcactatagggagacccaagcttggtaccgagctcggatcgatccatcgatgcctacctgcagccgccgcccacggcacggcagccaccatggcgctcctgctgtgcttcgtgctcctgtgcggagtagtggatttcgccagaagtttgagtatcactactcctgaagagatgattgaaaaagccaaaggggaaactgcctatctgccgtgcaaatttacgcttagtcccgaagaccagggaccgctggacatcgagtggctgatatcaccagctgataatcagaaggtggatcaagtgattattttatattctggagacaaaatttatgatgactactatccagatctgaaaggccgagtacattttacgagtaatgatctcaaatctggtgatgcatcaataaatgtaacgaatttacaactgtcagatattggcacatatcagtgcaaagtgaaaaaagctcctggtgttgcaaataagaagattcatctggtagttcttgttaagccttcaggtgcgagatgttacgttgatggatctgaagaaattggaagtgactttaagataaaatgtgaaccaaaagaaggttcacttccattacagtatgagtggcaaaaattgtctgactcacagaaaatgcccacttcatggttagcagaaatgacttcatctgttatatctgtaaaaaatgcctcttctgagtactctgggacatacagctgtacagtcagaaacagagtgggctctgatcagtgcctgttgcgtctaaacgttgtccctccttcaaataaagctggactaattgcaggagccattataggaactttgcttgctctagcgctcattggtcttatcatcttttgctgtcgtaaaaagcgcagagaagaaaaatatgaaaaggaagttcatcacgatatcagggaagatgtgccacctccaaagagccgtacgtccactgccagaagctacatcggcagtaatcattcatccctggggtccatgtctccttccaacatggaaggatattccaagactcagtataaccaagtaccaagtgaagactttgaacgcactcctcagagtccgactctcccacctgctaaggtagctgcccctaatctaagtcgaatgggtgcgattcctgtgatgattccagcacagagcaaggatgggtctatagtatagagcctcggatccactagtaacggccgccagtgtgctggaattaattcgctgtctgcgagggccggctgttggggtgagtactccctctcaaaagcgggcatgacttctgcgctaagattgtcagtttccaaaaacgaggaggatttgatattcacctggcccgcggtgatgcctttgagggtggccgcgtccatctggtcagaaaagacaatctttttgttgtcaagcttgaggtgtggcaggcttgagatctggccatacacttgagtgacaatgacatccactttgcctttctctccacaggtgtccactcccaggtccaactgcaggtcgatcgagcatgcatctagggcggccaattcgcccctctccctcccccccccctaacgttactggccgaagccgcttggaataaggccggtgtgtgtttgtctatatgtgattttccaccatattgccgtcttttggcaatgtgagggcccggaaacctggccctgtcttcttgacgagcattcctaggggtctttcccctctcgccaaaggaatgcaaggtctgttgaatgtcgtgaaggaagcagttcctctggaagcttcttgaagacaaacaacgtctgtagcgaccctttgcaggcagcggaaccccccacctggcgacaggtgcctctgcggccaaaagccacgtgtataagatacacctgcaaaggcggcacaaccccagtgccacgttgtgagttggatagttgtggaaagagtcaaatggctctcctcaagcgtagtcaacaaggggctgaaggatgcccagaaggtaccccattgtatgggaatctgatctggggcctcggtgcacatgctttacatgtgtttagtcgaggttaaaaaagctctaggccccccgaaccacggggacgtggttttcctttgaaaaacacgatgataagcttgccacaaccccgggataattcctgcagccaatatgggatcggccattgaacaagatggattgcacgcaggttctccggccgcttgggtggagaggctattcggctatgactgggcacaacagacaatcggctgctctgatgccgccgtgttccggctgtcagcgcaggggcgcccggttctttttgtcaagaccgacctgtccggtgccctgaatgaactgcaggacgaggcagcgcggctatcgtggctggccacgacgggcgttccttgcgcagctgtgctcgacgttgtcactgaagcgggaagggactggctgctattgggcgaagtgccggggcaggatctcctgtcatctcaccttgctcctgccgagaaagtatccatcatggctgatgcaatgcggcggctgcatacgcttgatccggctacctgcccattcgaccaccaagcgaaacatcgcatcgagcgagcacgtactcggatggaagccggtcttgtcgatcaggatgatctggacgaagagcatcaggggctcgcgccagccgaactgttcgccaggctcaaggcgcgcatgcccgacggcgaggatctcgtcgtgacccatggcgatgcctgcttgccgaatatcatggtggaaaatggccgcttttctggattcatcgactgtggccggctgggtgtggcggaccgctatcaggacatagcgttggctacccgtgatattgctgaagagcttggcggcgaatgggctgaccgcttcctcgtgctttacggtatcgccgctcccgattcgcagcgcatcgccttctatcgccttcttgacgagttcttctgaggggatcaattctctagagctcgctgatcagcctcgactgtgcctctagttgccagccatctgttgtttgcccctcccccgtgccttccttgaccctggaaggtgccactcccactgtcctttcctaataaaatgaggaaattgcatcgcattgtctgagtaggtgtcattctattctggggggtggggtggggcaggacagcaagggggaggattgggaagacaatagcaggcatgctggggatgcggtgggctctatggcttctgaggcggaaagaaccagctggggctcgagtgcattctagttgtggtttgtccaaactcatcaatgtatcttatcatgtctgtataccgtcgacctctagctagagcttggcgtaatcatggtcatagctgtttcctgtgtgaaattgttatccgctcacaattccacacaacatacgagccggaagcataaagtgtaaagcctggggtgcctaatgagtgagctaactcacattaattgcgttgcgctcactgcccgctttccagtcgggaaacctgtcgtgccagctgcattaatgaatcggccaacgcgcggggagaggcggtttgcgtattgggcgctcttccgcttcctcgctcactgactcgctgcgctcggtcgttcggctgcggcgagcggtatcagctcactcaaaggcggtaatacggttatccacagaatcaggggataacgcaggaaagaacatgtgagcaaaaggccagcaaaaggccaggaaccgtaaaaaggccgcgttgctggcgtttttccataggctccgcccccctgacgagcatcacaaaaatcgacgctcaagtcagaggtggcgaaacccgacaggactataaagataccaggcgtttccccctggaagctccctcgtgcgctctcctgttccgaccctgccgcttaccggatacctgtccgcctttctcccttcgggaagcgtggcgctttctcaatgctcacgctgtaggtatctcagttcggtgtaggtcgttcgctccaagctgggctgtgtgcacgaaccccccgttcagcccgaccgctgcgccttatccggtaactatcgtcttgagtccaacccggtaagacacgacttatcgccactggcagcagccactggtaacaggattagcagagcgaggtatgtaggcggtgctacagagttcttgaagtggtggcctaactacggctacactagaaggacagtatttggtatctgcgctctgctgaagccagttaccttcggaaaaagagttggtagctcttgatccggcaaacaaaccaccgctggtagcggtggtttttttgtttgcaagcagcagattacgcgcagaaaaaaaggatctcaagaagatcctttgatcttttctacggggtctgacgctcagtggaacgaaaactcacgttaagggattttggtcatgagattatcaaaaaggatcttcacctagatccttttaaattaaaaatgaagttttaaatcaatctaaagtatatatgagtaaacttggtctgacagttaccaatgcttaatcagtgaggcacctatctcagcgatctgtctatttcgttcatccatagttgcctgactccccgtcgtgtagataactacgatacgggagggcttaccatctggccccagtgctgcaatgataccgcgagacccacgctcaccggctccagatttatcagcaataaaccagccagccggaagggccgagcgcagaagtggtcctgcaactttatccgcctccatccagtctattaattgttgccgggaagctagagtaagtagttcgccagttaatagtttgcgcaacgttgttgccattgctacaggcatcgtggtgtcacgctcgtcgtttggtatggcttcattcagctccggttcccaacgatcaaggcgagttacatgatcccccatgttgtgcaaaaaagcggttagctccttcggtcctccgatcgttgtcagaagtaagttggccgcagtgttatcactcatggttatggcagcactgcataattctcttactgtcatgccatccgtaagatgcttttctgtgactggtgagtactcaaccaagtcattctgagaatagtgtatgcggcgaccgagttgctcttgcccggcgtcaatacgggataataccgcgccacatagcagaactttaaaagtgctcatcattggaaaacgttcttcggggcgaaaactctcaaggatcttaccgctgttgagatccagttcgatgtaacccactcgtgcacccaactgatcttcagcatcttttactttcaccagcgtttctgggtgagcaaaaacaggaaggcaaaatgccgcaaaaaagggaataagggcgacacggaaatgttgaatactcatactcttcctttttcaatattattgaagcatttatcagggttattgtctcatgagcggatacatatttgaatgtatttagaaaaataaacaaataggggttccgcgcacatttccccgaaaagtgccacctgacgtc

SEQ ID NO: 64 - DNA, 6280 bp, Artificial Sequence
  Made in a laboratory from synthetic material
gacggatcgggagatctcccgatcccctatggtcgactctcagtacaatctgctctgatgccgcatagttaagccagtatctgctccctgcttgtgtgttggaggtcgctgagtagtgcgcgagcaaaatttaagctacaacaaggcaaggcttgaccgacaattgcatgaagaatctgcttagggttaggcgttttgcgctgcttcgcgatgtacgggccagatatacgcgttgacattgattattgactagttattaatagtaatcaattacggggtcattagttcatagcccatatatggagttccgcgttacataacttacggtaaatggcccgcctggctgaccgcccaacgacccccgcccattgacgtcaataatgacgtatgttcccatagtaacgccaatagggactttccattgacgtcaatgggtggactatttacggtaaactgcccacttggcagtacatcaagtgtatcatatgccaagtacgccccctattgacgtcaatgacggtaaatggcccgcctggcattatgcccagtacatgaccttatgggactttcctacttggcagtacatctacgtattagtcatcgctattaccatggtgatgcggttttggcagtacatcaatgggcgtggatagcggtttgactcacggggatttccaagtctccaccccattgacgtcaatgggagtttgttttggcaccaaaatcaacgggactttccaaaatgtcgtaacaactccgccccattgacgcaaatgggcggtaggcgtgtacggtgggaggtctatataagcagagctctctggctaactagagaacccactgcttactggcttatcgaaattaatacgactcactatagggagacccaagcttggtaccgagctcggatcgatccatcgatgcctacctgcagccgccgcccacggcacggcagccaccatggcgctcctgctgtgcttcgtgctcctgtgcggagtagtggatttcgccagaagtttgagtatcactactcctgaagagatgattgaaaaagccaaaggggaaactgcctatctgccgtgcaaatttacgcttagtcccgaagaccagggaccgctggacatcgagtggctgatatcaccagctgataatcagaaggtggatcaagtgattattttatattctggagacaaaatttatgatgactactatccagatctgaaaggccgagtacattttacgagtaatgatctcaaatctggtgatgcatcaataaatgtaacgaatttacaactgtcagatattggcacatatcagtgcaaagtgaaaaaagctcctggtgttgcaaataagaagattcatctggtagttcttgttaagccttcaggtgcgagatgttacgttgatggatctgaagaaattggaagtgactttaagataaaatgtgaaccaaaagaaggttcacttccattacagtatgagtggcaaaaattgtctgactcacagaaaatgcccacttcatggttagcagaaatgacttcatctgttatatctgtaaaaaatgcctcttctgagtactctgggacatacagctgtacagtcagaaacagagtgggctctgatcagtgcctgttgcgtctaaacgttgtccctccttcaaataaagctggactaattgcaggagccattataggaactttgcttgctctagcgctcattggtcttatcatcttttgctgtcgtaaaaagcgcagagaagaaaaatatgaaaaggaagttcatcacgatatcagggaagatgtgccacctccaaagagccgtacgtccactgccagaagctacatcggcagtaatcattcatccctggggtccatgtctccttccaacatggaaggatattccaagactcagtataaccaagtaccaagtgaagactttgaacgcactcctcagagtccgactctcccacctgctaaggtagctgcccctaatctaagtcgaatgggtgcgattcctgtgatgattccagcacagagcaaggatgggtctatagtatagagcctcggatccgcggccgcatagataactgatccagtgtgctggaattaattcgctgtctgcgagggccagctgttggggtgagtactccctctcaaaagcgggcatgacttctgcgctaagattgtcagtttccaaaaacgaggaggatttgatattcacctggcccgcggtgatgcctttgagggtggccgcgtccatctggtcagaaaagacaatctttttgttgtcaagcttgaggtgtggcaggcttgagatctggccatacacttgagtgacaatgacatccactttgcctttctctccacaggtgtccactcccaggtccaactgcaggtcgagcatgcatctagggcggccaattccgcccctctccctcccccccccctaacgttactggccgaagccgcttggaataaggccggtgtgcgtttgtctatatgtgattttccaccatattgccgtcttttggcaatgtgagggcccggaaacctggccctgtcttcttgacgagcattcctaggggtctttcccctctcgccaaaggaatgcaaggtctgttgaatgtcgtgaaggaagcagttcctctggaagcttcttgaagacaaacaacgtctgtagcgaccctttgcaggcagcggaaccccccacctggcgacaggtgcctctgcggccaaaagccacgtgtataagatacacctgcaaaggcggcacaaccccagtgccacgttgtgagttggatagttgtggaaagagtcaaatggctctcctcaagcgtattcaacaaggggctgaaggatgcccagaaggtaccccattgtatgggatctgatctggggcctcggtgcacatgctttacatgtgtttagtcgaggttaaaaaaacgtctaggccccccgaaccacggggacgtggttttcctttgaaaaacacgatgataagcttgccacaacccacaaggagacgaccttccatgaccgagtacaagcccacggtgcgcctcgccacccgcgacgacgtcccccgggccgtacgcaccctcgccgccgcgttcgccgactaccccgccacgcgccacaccgtcgacccggaccgccacatcgagcgggtcaccgagctgcaagaactcttcctcacgcgcgtcgggctcgacatcggcaaggtgtgggtcgcggacgacggcgccgcggtggcggtctggaccacgccggagagcgtcgaagcgggggcggtgttcgccgagatcggcccgcgcatggccgagttgagcggttcccggctggccgcgcagcaacagatggaaggcctcctggcgccgcaccggcccaaggagcccgcgtggttcctggccaccgtcggcgtctcgcccgaccaccagggcaagggtctgggcagcgccgtcgtgctccccggagtggaggcggccgagcgcgccggggtgcccgccttcctggagacctccgcgccccgcaacctccccttctacgagcggctcggcttcaccgtcaccgccgacgtcgagtgcccgaaggaccgcgcgacctggtgcatgacccgcaagcccggtgcctgacgcccgccccacgacccgcagcgcccgaccgaaaggagcgcacgaccccatggctccgaccgaagccgacccgggcggccccgccgaccccgcacccgcccccgaggcccaccgactctagagctcgctgatcagcctcgactgtgccttctagttgccagccatctgttgtttgcccctcccccgtgccttccttgaccctggaaggtgccactcccactgtcctttcctaataaaatgaggaaattgcatcgcattgtctgagtaggtgtcattctattctggggggtggggtggggcaggacagcaagggggaggattgggaagacaatagcaggcatgctggggatgcggtgggctctatggcttctgaggcggaaagaaccagctggggctcgagtgcattctagttgtggtttgtccaaactcatcaatgtatcttatcatgtctgtataccgtcgacctctagctagagcttggcgtaatcatggtcatagctgtttcctgtgtgaaattgttatccgctcacaattccacacaacatacgagccggaagcataaagtgtaaagcctggggtgcctaatgagtgagctaactcacattaattgcgttgcgctcactgcccgctttccagtcgggaaacctgtcgtgccagctgcattaatgaatcggccaacgcgcggggagaggcggtttgcgtattgggcgctcttccgcttcctcgctcactgactcgctgcgctcggtcgttcggctgcggcgagcggtatcagctcactcaaaggcggtaatacggttatccacagaatcaggggataacgcaggaaagaacatgtgagcaaaaggccagcaaaaggccaggaaccgtaaaaaggccgcgttgctggcgtttttccataggctccgcccccctgacgagcatcacaaaaatcgacgctcaagtcagaggtggcgaaacccgacaggactataaagataccaggcgtttccccctggaagctccctcgtgcgctctcctgttccgaccctgccgcttaccggatacctgtccgcctttctcccttcgggaagcgtggcgctttctcaatgctcacgctgtaggtatctcagttcggtgtaggtcgttcgctccaagctgggctgtgtgcacgaaccccccgttcagcccgaccgctgcgccttatccggtaactatcgtcttgagtccaacccggtaagacacgacttatcgccactggcagcagccactggtaacaggattagcagagcgaggtatgtaggcggtgctacagagttcttgaagtggtggcctaactacggctacactagaaggacagtatttggtatctgcgctctgctgaagccagttaccttcggaaaaagagttggtagctcttgatccggcaaacaaaccaccgctggtagcggtggtttttttgtttgcaagcagcagattacgcgcagaaaaaaaggatctcaagaagatcctttgatcttttctacggggtctgacgctcagtggaacgaaaactcacgttaagggattttggtcatgagattatcaaaaaggatcttcacctagatccttttaaattaaaaatgaagttttaaatcaatctaaagtatatatgagtaaacttggtctgacagttaccaatgcttaatcagtgaggcacctatctcagcgatctgtctatttcgttcatccatagttgcctgactccccgtcgtgtagataactacgatacgggagggcttaccatctggccccagtgctgcaatgataccgcgagacccacgctcaccggctccagatttatcagcaataaaccagccagccggaagggccgagcgcagaagtggtcctgcaactttatccgcctccatccagtctattaattgttgccgggaagctagagtaagtagttcgccagttaatagtttgcgcaacgttgttgccattgctacaggcatcgtggtgtcacgctcgtcgtttggtatggcttcattcagctccggttcccaacgatcaaggcgagttacatgatcccccatgttgtgcaaaaaagcggttagctccttcggtcctccgatcgttgtcagaagtaagttggccgcagtgttatcactcatggttatggcagcactgcataattctcttactgtcatgccatccgtaagatgcttttctgtgactggtgagtactcaaccaagtcattctgagaatagtgtatgcggcgaccgagttgctcttgcccggcgtcaatacgggataataccgcgccacatagcagaactttaaaagtgctcatcattggaaaacgttcttcggggcgaaaactctcaaggatcttaccgctgttgagatccagttcgatgtaacccactcgtgcacccaactgatcttcagcatcttttactttcaccagcgtttctgggtgagcaaaaacaggaaggcaaaatgccgcaaaaaagggaataagggcgacacggaaatgttgaatactcatactcttcctttttcaatattattgaagcatttatcagggttattgtctcatgagcggatacatatttgaatgtatttagaaaaataaacaaataggggttccgcgcacatttccccgaaaagtgccacctgacgtc

SEQ ID NO: 65 - DNA, 28 bp, Artificial Sequence
  Made in a laboratory from synthetic material
cggatatcgctgcccccaagtgtaactc

SEQ ID NO: 66 - DNA, 63 bp, Artificial Sequence
  Made in a laboratory from synthetic material
taaagcggccgcttacttatcgtcgtcatccttgtaatcaggatccattggttcaactgtctc

SEQ ID NO: 67 - DNA, 7309 bp, Artificial Sequence
  Made in a laboratory from synthetic material
gacggatcgggagatctcccgatcccctatggtcgactctcagtacaatctgctctgatgccgcatagttaagccagtatctgctccctgcttgtgtgttggaggtcgctgagtagtgcgcgagcaaaatttaagctacaacaaggcaaggcttgaccgacaattgcatgaagaatctgcttagggttaggcgttttgcgctgcttcgcgatgtacgggccagatatacgcgttgacattgattattgactagttattaatagtaatcaattacggggtcattagttcatagcccatatatggagttccgcgttacataacttacggtaaatggcccgcctggctgaccgcccaacgacccccgcccattgacgtcaataatgacgtatgttcccatagtaacgccaatagggactttccattgacgtcaatgggtggactatttacggtaaactgcccacttggcagtacatcaagtgtatcatatgccaagtacgccccctattgacgtcaatgacggtaaatggcccgcctggcattatgcccagtacatgaccttatgggactttcctacttggcagtacatctacgtattagtcatcgctattaccatggtgatgcggttttggcagtacatcaatgggcgtggatagcggtttgactcacggggatttccaagtctccaccccattgacgtcaatgggagtttgttttggcaccaaaatcaacgggactttccaaaatgtcgtaacaactccgccccattgacgcaaatgggcggtaggcgtgtacggtgggaggtctatataagcagagctctctggctaactagagaacccactgcttactggcttatcgaaattaatacgactcactatagggagacccaagcttggtaccgagctcggatcgatatcgctgcccccaagtgtaactccagcactgtgaggtttcagggattggcagaggggaccaaggggaccatgaaaatggacatggaggatgcggatatgactctgtggacagaggctgagtttgaagagaagtgtacatacattgtgaacgaccacccctgggattctggtgctgatggcggtacttcggttcaggcggaggcatccttaccaaggaatctgcttttcaagtatgccaccaacagtgaagaggttattggagtgatgagtaaagaatacataccaaagggcacacgttttggacccctaataggtgaaatctacaccaatgacacagttcctaagaacgccaacaggaaatatttttggaggatctattccagaggggagcttcaccacttcattgacggctttaatgaagagaaaagcaactggatgcgctatgtgaatccagcacactctccccgggagcaaaacctggctgcgtgtcagaacgggatgaacatctacttctacaccattaagcccatccctgccaaccaggaacttcttgtgtggtattgtcgggactttgcagaaaggcttcactacccttatcccggagagctgacaatgatgaatctcacacaaacacagagcagtctaaagcaaccgagcactgagaaaaatgaactctgcccaaagaatgtcccaaagagagagtacagcgtgaaagaaatcctaaaattggactccaacccctccaaaggaaaggacctctaccgttctaacatttcacccctcacatcagaaaaggacctcgatgactttagaagacgtgggagccccgaaatgcccttctaccctcgggtcgtttaccccatccgggcccctctgccagaagactttttgaaagcttccctggcctacgggatcgagagacccacgtacatcactcgctcccccattccatcctccaccactccaagcccctctgcaagaagcagccccgaccaaagcctcaagagctccagccctcacagcagccctgggaatacggtgtcccctgtgggccccggctctcaagagcaccgggactcctacgcttacttgaacgcgtcctacggcacggaaggtttgggctcctaccctggctacgcacccctgccccacctcccgccagctttcatcccctcgtacaacgctcactaccccaagttcctcttgcccccctacggcatgaattgtaatggcctgagcgctgtgagcagcatgaatggcatcaacaactttggcctcttcccgaggctgtgccctgtctacagcaatctcctcggtgggggcagcctgccccaccccatgctcaaccccacttctctcccgagctcgctgccctcagatggagcccggaggttgctccagccggagcatcccagggaggtgcttgtcccggcgccccacagtgccttctcctttaccggggccgccgccagcatgaaggacaaggcctgtagccccacaagcgggtctcccacggcgggaacagccgccacggcagaacatgtggtgcagcccaaagctacctcagcagcgatggcagcccccagcagcgacgaagccatgaatctcattaaaaacaaaagaaacatgaccggctacaagacccttccctacccgctgaagaagcagaacggcaagatcaagtacgaatgcaacgtttgcgccaagactttcggccagctctccaatctgaaggtccacctgagagtgcacagtggagaacggcctttcaaatgtcagacttgcaacaagggctttactcagctcgcccacctgcagaaacactacctggtacacacgggagaaaagccacatgaatgccaggtctgccacaagagatttagcagcaccagcaatctcaagacccacctgcgactccattctggagagaaaccataccaatgcaaggtgtgccctgccaagttcacccagtttgtgcacctgaaactgcacaagcgtctgcacacccgggagcggccccacaagtgctcccagtgccacaagaactacatccatctctgtagcctcaaggttcacctgaaagggaactgcgctgcggccccggcgcctgggctgcccttggaagatctgacccgaatcaatgaagaaatcgagaagtttgacatcagtgacaatgctgaccggctcgaggacgtggaggatgacatcagtgtgatctctgtagtggagaaggaaattctggccgtggtcagaaaagagaaagaagaaactggcctgaaagtgtctttgcaaagaaacatggggaatggactcctctcctcagggtgcagcctttatgagtcatcagatctacccctcatgaagttgcctcccagcaacccactacctctggtacctgtaaaggtcaaacaagaaacagttgaaccaatggatcctgattacaaggatgacgacgataagtaagcggccgcgcggccgccaccatggagcagaagctgatcagcgaggaggacctgctcgagatccactagtaacggccgccagtgtgctggaattaattcgctgtctgcgagggccagctgttggggtgagtactccctctcaaaagcgggcatgacttctgcgctaagattgtcagtttccaaaaacgaggaggatttgatattcacctggcccgcggtgatgcctttgagggtggccgcgtccatctggtcagaaaagacaatctttttgttgtcaagcttgaggtgtggcaggcttgagatctggccatacacttgagtgacaatgacatccactttgcctttctctccacaggtgtccactcccaggtccaactgcaggtcgagcatgcatctagggcggccaattccgcccctctccctcccccccccctaacgttactggccgaagccgcttggaataaggccggtgtgcgtttgtctatatgtgattttccaccatattgccgtcttttggcaatgtgagggcccggaaacctggccctgtcttcttgacgagcattcctaggggtctttcccctctcgccaaaggaatgcaaggtctgttgaatgtcgtgaaggaagcagttcctctggaagcttcttgaagacaaacaacgtctgtagcgaccctttgcaggcagcggaaccccccacctggcgacaggtgcctctgcggccaaaagccacgtgtataagatacacctgcaaaggcggcacaaccccagtgccacgttgtgagttggatagttgtggaaagagtcaaatggctctcctcaagcgtattcaacaaggggctgaaggatgcccagaaggtaccccattgtatgggatctgatctggggcctcggtgcacatgctttacatgtgtttagtcgaggttaaaaaaacgtctaggccccccgaaccacggggacgtggttttcctttgaaaaacacgatgataagcttgccacaacccgggataattcctgcagccaccatggccaagttgaccagtgccgttccggtgctcaccgcgcgcgacgtcgccggagcggtcgagttctggaccgaccggctcgggttctcccgggacttcgtggaggacgacttcgccggtgtggtccgggacgacgtgaccctgttcatcagcgcggtccaggaccaggtggtgccggacaacaccctggcctgggtgtgggtgcgcggcctggacgagctgtacgccgagtggtcggaggtcgtgtccacgaacttccgggacgcctccgggccggccatgaccgagatcggcgagcagccgtgggggcgggagttcgccctgcgcgacccggccggcaactgcgtgcacttcgtggccgaggagcaggactgatctagagctcgctgatcagcctcgactgtgccttctagttgccagccatctgttgtttgcccctcccccgtgccttccttgaccctggaaggtgccactcccactgtcctttcctaataaaatgaggaaattgcatcgcattgtctgagtaggtgtcattctattctggggggtggggtggggcaggacagcaagggggaggattgggaagacaatagcaggcatgctggggatgcggtgggctctatggcttctgaggcggaaagaaccagctggggctcgatcgagtgcattctagttgtggtttgtccaaactcatcaatgtatcttatcatgtctgtataccgtcgacctctagctagagcttggcgtaatcatggtcatagctgtttcctgtgtgaaattgttatccgctcacaattccacacaacatacgagccggaagcataaagtgtaaagcctggggtgcctaatgagtgagctaactcacattaattgcgttgcgctcactgcccgctttccagtcgggaaacctgtcgtgccagctgcattaatgaatcggccaacgcgcggggagaggcggtttgcgtattgggcgctcttccgcttcctcgctcactgactcgctgcgctcggtcgttcggctgcggcgagcggtatcagctcactcaaaggcggtaatacggttatccacagaatcaggggataacgcaggaaagaacatgtgagcaaaaggccagcaaaaggccaggaaccgtaaaaaggccgcgttgctggcgtttttccataggctccgcccccctgacgagcatcacaaaaatcgacgctcaagtcagaggtggcgaaacccgacaggactataaagataccaggcgtttccccctggaagctccctcgtgcgctctcctgttccgaccctgccgcttaccggatacctgtccgcctttctcccttcgggaagcgtggcgctttctcaatgctcacgctgtaggtatctcagttcggtgtaggtcgttcgctccaagctgggctgtgtgcacgaaccccccgttcagcccgaccgctgcgccttatccggtaactatcgtcttgagtccaacccggtaagacacgacttatcgccactggcagcagccactggtaacaggattagcagagcgaggtatgtaggcggtgctacagagttcttgaagtggtggcctaactacggctacactagaaggacagtatttggtatctgcgctctgctgaagccagttaccttcggaaaaagagttggtagctcttgatccggcaaacaaaccaccgctggtagcggtggtttttttgtttgcaagcagcagattacgcgcagaaaaaaaggatctcaagaagatcctttgatcttttctacggggtctgacgctcagtggaacgaaaactcacgttaagggattttggtcatgagattatcaaaaaggatcttcacctagatccttttaaattaaaaatgaagttttaaatcaatctaaagtatatatgagtaaacttggtctgacagttaccaatgcttaatcagtgaggcacctatctcagcgatctgtctatttcgttcatccatagttgcctgactccccgtcgtgtagataactacgatacgggagggcttaccatctggccccagtgctgcaatgataccgcgagacccacgctcaccggctccagatttatcagcaataaaccagccagccggaagggccgagcgcagaagtggtcctgcaactttatccgcctccatccagtctattaattgttgccgggaagctagagtaagtagttcgccagttaatagtttgcgcaacgttgttgccattgctacaggcatcgtggtgtcacgctcgtcgtttggtatggcttcattcagctccggttcccaacgatcaaggcgagttacatgatcccccatgttgtgcaaaaaagcggttagctccttcggtcctccgatcgttgtcagaagtaagttggccgcagtgttatcactcatggttatggcagcactgcataattctcttactgtcatgccatccgtaagatgcttttctgtgactggtgagtactcaaccaagtcattctgagaatagtgtatgcggcgaccgagttgctcttgcccggcgtcaatacgggataataccgcgccacatagcagaactttaaaagtgctcatcattggaaaacgttcttcggggcgaaaactctcaaggatcttaccgctgttgagatccagttcgatgtaacccactcgtgcacccaactgatcttcagcatcttttactttcaccagcgtttctgggtgagcaaaaacaggaaggcaaaatgccgcaaaaaagggaataagggcgacacggaaatgttgaatactcatactcttcctttttcaatattattgaagcatttatcagggttattgtctcatgagcggatacatatttgaatgtatttagaaaaataaacaaataggggttccgcgcacatttccccgaaaagtgccacctgacgtc

SEQ ID NO: 68 - DNA, 13886 bp, Artificial Sequence
  Made in a laboratory from synthetic material
ggtacctgcacttcccaagtgtccacttgtattctgtttctttacttctgtttacagaaagtagacacatattcagtcttagtaccagtgtagggagcgctttccatgagatggataccagaaaaaaatggcaaacatgggatccgttaatataaaaattagccacgatgtatatatatatatgtgtgtgtgtgtgtgtgtgtgtgtgtacacacgcgcgcgcatgtgtgagttgaatagcagagttggagtgggtttctatccacatgtacctgcacctgcaggtattctcaggtgccataatcaactgtaggaccctaaaggaaataagagtctcccctcaacccctgaagagtgtttgggttcaccgtgtgtccaatgattctgtgcctcttgagctccaggaaagggctccctggtgatgcatgagatcttttcttggagtctctctgcagagttcactgggtttcctaaaggcaattcactatttcaaaagatggtgtgaggagcatgtggtgtccctaaaggagaattctgagccagggcacaaccactttatactgagctggatacactggtaggaatatactctgtcagctcagatagaaacctccctgcatggttggggctgggctgcagggggcgctccggatacacccagcacaggctcccgccccagagcaggtgcacaggaggctggggagaggttcctcccagggcctgggacttcctttaaaaatatctaaaataagtatttcacaaagactgctgaagtttgtataaatatctattcaattgtgagcatttatcaaactggatgttgtaatgagaaccacttttacaatggggatttcaaactctgctggaggtcaggaagagatcctttcttataaataaatgcaatttttggataaacacagtcattccctaaataacgcattcacatattatggtctagaaatgatgcaagttgaccctgagacagtcaaatgtggtttcaaagtgaggtgctgtccttgaggagcttgttctccagtgggggaagctctgtcaacacagagttcagggatgtgtaggggacacatggcctctaacaggattacggcttgaaccctcagcttctacagttgtgtcacccatgtgtctgtttctcatactgggtcaggaattgggctattaaatagcatccttcatgaatatgcaattaactgaggtgactatagtatctccgttccctgagagcctcacccaacaaccacacccctcctctggagaagcccctagatcacagctcctcaccatggactggacctgaaggatcctcttcttgatggcagcagcaacaggtaaggggctccccagtctcagggctgaggaagaaaccaggccagtcatgtgagacttcacccactcttgtgtccactccacaggtgcccactccctgcagctggtgcagtctgggcctgaggtgaagaagcctggggcctcagtgaaggtctcctataagtcttctggttacaccttcaccatctatggtatgaattgggtatgatagacccctggacagggctttgagtggatgtgatggatcatcacctacactgggaacccaacgtatacccacggcttcacaggatggtttgtcttctccatggacacgtctgtcagcacggcgtgtcttcagatcagcagcctaaaggctgaggacacggccgagtattactgtgcgaagtacacagtgtggaaacccacatcccgagagtttcagaaagcctgaggaaggaggcagctgtgctgagctgaggcagtggtacagcagttttctgaacttccatagtatctcattttgcattgagttccgctttaatattagccaagaatatgggatagacgggtgctcctaagagatccttaacttgcccattttgatgggttttcccaaagacgtgagaagccacttttttcgcaaagcatcccaaagccatgccctgctccagaaacacgtgtatccatttcctggtctttgattaactgacaaactctcatcagcgcacctgggctaatttcacatcaggtagaaatatgtgctttaaagcaaggctaacgttgtaatagcaattcctgcttaataaccttcagcattgttgttgtgtgctccatcaactaattacgttagttcaaggttctcaatgggagtttctaataaatataagggatgtatagaagttcccctaattaaaacaattgtgaagacaacctcagtgttcaaccatatttcaacccttcaccacaaaggaactttcatctctcctggaagttgggttcattttcaaattagtttttttattttaatatctcaagattattgtatgtgactattttagcagaaagtgaattatgggaacttgaactaaccaactgaaaatacattcagaactaattaaacaagatgccagaatgtgattggctccaggcattttaaattcaacaggttatgtaaccaggctttaaatttgcacatcttcgtgttaccttcatgacacagtcaactcccattatgtaagaaatggtgagtgcattcccaagggtcttgcacagttataaaaatagacttgatgaggtgaggagttgtttaaattcccctctgaagaagcagcatcaacccaacaaaccactctcttccctctgtgactagagctctgtcacaggccacatggacctaaatccttgatggagattacaggactacgtaaattggactgatcgtttttatgctgttaaattaataggtgagtctgcactccagcctgggcaacagaataatcttgtctgtaaaatacaaaagaaagataaattaatagatactgactttgacatttcggataataatattttcataaaccgaatttaattatacccacattgttacctacaccttcactgaaaagttcctagttatgttgagttccatcaacactccacatgttcaaatctggacatccaagagagtctagagaataaaacgcaatgagggcagtgaaacttgcgtatattcagcacctcttaactcaggaggactcaatacaccctggaacactctgcttttctgaatggctcacaatgactccagctcactctccaacctcctcaaacatctggcctctgtttgccctaagttcacgctctgctcttagtctatgttctgaagtctttgtagaggtgaaaatgagctgtcagatggatcttccttctcactgcaacatggaatttgctatttcacttaatgaccactctttccacaatggttgatttcttttggcctgttcattactggtgattttcaagggaatctcagttgaatctttactgttttgcattttgtctccatgacaatgttgggaagtttttcttctagcagcataacatgatctagtgacctgacacatttgcagcaaacaatacctacaaattcagaagctctttggttttctttccacgaaatataattcttgctcttctgtgtatgagcacatcctagcatccctgtacacacccaggtagatgtaaacacgccgatgaaatattccctgtaaataaaaaaagtatctcagtttctctcaatgttcataattctcctgagggtgaggaaggtacttctgggtctgctcaaacaaatggcccagagaccacctggtaggtaggtaaggagctcacctcgctctggatattgagtctgtctctttccctctgtcgtctcatagaaggccagcccacttgttcagctcctaagaagagagcccaggtttatccagattatacaacacaaccagcttctgatgactctcctgttacaacatccatggagatattttgtgtattatataattcaccaaactaatgtgaaatgcccaagttgcaatactgcacaccctagggtatgttcttgcaattcagcggaggagaaattctttcagagacagatggatctgaattggtaaatatgtgggtacgaattctgggtttgagtgtcattgtccagccatgtttcacaggtgtgacctgtcagggaagaaccagagttccttgttctctcagagggtagagctcacagaggtcctctctggttcccaggaaaggtaatttcactaatcttggtgatgagactatcctccagtgctgatgtactatagagttttcatctgaagctgtcactgctatccccaatgtacatcttttcacacagaaatgtttagaggtcaggccatattctcagggttacacattgagaaggatggagatatattctactaccttctcctgagatctcacacacaatctcaaatttcaaaaggtctcagaagggcagctctcaggtactatttaaaaataacccacttcctgggacaggtagcatccttctaaccatgatggatgttctgaactacagtacacattgcatggatccaggtttgtctcaattcactgtgattattacactcagcagctgtttcaatatgtctgaaggggtaaatgacaatttaggtgacctgggtgtatggttggtgttatatgaatctttaaatgtagaacagtattaactgtattccaaaatctgtctttgatccatgatcacacttgtctcccagaccagctccttcagcacatttcctacctggaagaagaggactctgggtttggtgaggggaggccacaggaagagaactgagttctcagagggcacagccagcatacacctcccagggtgagcccaaaagactggggcctccctcatccctttttacctatccatacaaaggcaccacccacatgcaaatcctcacttaggcacccacaggaaatgactacacatttccttaaattcagggtccagctcacatgggaagtgctttctgagagtcagggcccgccaccatgagcgaaaaatacatcgtcacctgggacatgttgcagatccatgcacgtaaactcgcaagccgactgatgccttctgaacaatggaaaggcattattgccgtaagccgtggcggtctggtaccgggtgcgttactggcgcgtgaactgggtattcgtcatgtcgataccgtttgtatttccagctacgatcacgacaaccagcgcgagcttaaagtgctgaaacgcgcagaaggcgatggcgaaggcttcatcgttattgatgacctggtggataccggtggtactgcggttgcgattcgtgaaatgtatccaaaagcgcactttgtcaccatcttcgcaaaaccggctggtcgtccgctggttgatgactatgttgttgatatcccgcaagatacctggattgaacagccgtgggatatgggcgtcgtattcgtcccgccaatctccggtcgctaatcttttcaactcgaggtcgacggtatcgataacccatgcctggaagcttcccgccacagccctccccatggggccctgctgcctcctcaggtcagccccggacatcccgggtttccccaggctgggcggtaggtttggggtgaggtctgtgtcactgtggtattactatggttcggggagttattataccaagtgacctactggtgcttcgatctcaggggccgtggcaccctggtcactgtctcctcaggtgagtcccactgcagccccctcccagtcttctctgtccaggcaccaggccaggtatctggggtctgcagccggcctgggtctggcctgaggccacaccagctgccatccctggggtctccgccatgggctgcatgccagagccctgctgtcacttagccctggggccagctggagcccccaaggacaggcagggaccccgctgggcttcagccccgtcagggaccctccacaggtagcaagcaggccgagggcagggacgggaaggagaagttgtgggcagagcctgggctggggctgggcgctggctgttcatgtgccggggaccaggcctgcgctttagtgtggctacaagtgcttggagcactggggccagggcagcccggccaccgtctccctgggaacgtcacccctccctgcctgggtctcagcccgggggtctgtgtggctggggacagggacgccggctgcctctgctctgtgcttgggccatgtgacccattcgagtgtcctgcagaattcaacccatgcctgaaagtttcccgccacagccctccccatggggccgtgctgcctcctcaggtcagccccggacatcccgggtttccccaggttggccggtaggtttggggtaaggtctgtgtcactgtggtattactatggttcaaggaagctccgtaagctttttgatatctggggccaagggacaatggtcaccgtctcttcaggtaagatggctttccttctgcctcctttctctgggcccagcgtcctctgtcctggagctgggagataatgtccgggggctccttggtctgcgctgggccatgtggggccctccggggctccttctccggctgtttgggaccacgttcagcagaaggcctttctttgggaactgggactctgctgctggggcaaagggtgggcagagtcatgcttgtgctggggacaaaatgaccttgggacacggggctggctgccacggccggcccgggacagtcggagagtcaggtggatccaacccatgcctggaagcttcccgccacagccctccccatggggccctgctgcctcctcaggtcaaccccggacatcccgggtttccccaggctggccggtaggtttggggtgaggtctgtgtcactgtggtattgctatggttcagggagttattataaagtccccaactttgactactggggccagggaaccctggtcaccgtctcctcaggtgagtcctcacaacctctctcctgctttaactctgaaggattttgctgcatttttggggggaaataagggtgctgggtctcctgccaagagagccccggagcagcctggggggctcaggaggctgccctgaggcaacagcggccacacagacgaggggcaagggctccagatgctccttcctcctgagcccaacagcacgggtctctctgtggcagggccaccctagcctctggggtccaatgcccaacaacccccgggccccttcccgggctcagtctgagagggtcccaactagtaacccatgcctggaagcttcccgccacagccctccccatggggccctgctgcctcctcaggtcagccccggacatcccgggtttccccaggctgggcggtaggtttggggtgaggtctgtgtcactgtggtattactatggttcagggagttatttgccggaaatgacaactggttcgacccctggggccagggaaccctggtcaccgtctcctcaggtgagtcctcaccaccccctctctgagtccacttagggagactcagcttgccagggtctcagggtcaaagtcttggaggcattttggaggtcaagaaagaaagccggggagagggacccttcgaatgggaacccagcctgtcctccccaagtccggccacagatgtcggcagctggggggctccttcgctggtctggggtgacctatctccgcttcacctgtagcattctcaggggctgtcgtgatgattgcgtggtgggactctgtcccgcttcaaggcacccgctctctgggacgggtgccccccggggtttttggactcctgggggtgacttagcagccgtctgcttgcagttggacttcccaggccgacagtggtctggcttctgaggggtcaggccagaatgtggggtacgtgggaggccagcagagggttccatgagaagggcaggacagggccacggacagtcagcttccatgtgacgcccggagacagaaggtctctgtctagaaacccatgcctggaagcttcccgccacagccctccccatggggccctgctgcctcctcaggtcagacccggacatcccgggtttccccaggctgggcggtaggtttggggtgaggtctgtgtcactgtggtatttctatgcttcggggagttaacgcgtcgcggctactactgctcggacgtctggggcaaagggaccacggtcaccgtctcctcaggtaagaatggccactctagggcctttgttttctgctactgcctgtggggtttcctgagcattgcaggttggtcttcggggcatgttccgaggggacctgggcggactggccaggaggggatgggcactggggtgccttgaggatctgggagcctctgtggattttccgatgcctttggaaaatgggactcaggttgggtgcgtctgatggagtaactgagcctgggggcttggggagccacatttggaccagatgcctgaacaaaccaggggtcttagtgatggcttgaggaatgtgtctcaggagcggtgtctgtaggactgcaagatcgctgcacagcagcgaatcgtgaaatattttctttagaattatgaggtgcgctgtgtgtcaacctgcatcttaaattctttattggctggaaagagaactgtcggagtgggtgaatccagccaggagggacgcgtagccccggtcttgatgagagcagggttgggggcaggggtagcccagaaacggtggctgccgtcctgacaggggcttagggaggctccaggacctcagtgccttgaagctggtttccatgagaaaaggattgtttatcttaggaggcatgcttactgttaaaagacaggatatgtttgaagtggcttctgagaaaaatggttaagaaaattatgacttaaaaatgtgagagattttcaagtatattaatttttttaactgtccaagtatttgaaattcttatcatttgattaacacccatgagtgatatgtgtctggaattgaggccgcgctggagtaactgagcctgggggcttggggagccacatttggacgagatgcctgaacaaaccaggggtcttagtgatggctgaggaatgtgtctcaggagcggtgtctgtaggactgcaagatcgctgcacagcagcgaatcgtgaaatattttctttagaattatgaggtgcgctgtgtgtcaacctgcatcttaaattctttattggctggaaagagaactgtcggagtgggtgaatccagccaggagggacgcgtagccccggtcttgatgagagcagggttgggggcaggggtagcccagaaacggtggctgccgtcctgacaggggcttagggaggctccaggacctcagtgccttgaagctggtttccatgagaaaaggattgtttatcttaggaggcatgcttactgttaaaagacaggatatgtttgaagtggcttctgagaaaaatggttaagaaaattatgacttaaaaatgtgagagattttcaagtatattaatttttttaactgtccaagtatttgaaattcttatcatttgattaacacccatgagtgatatgtgtctggaattgaggccaaagcaagctcagctaagaaatactagcacagtgctgtcggccccgatgcgggactgcgttttgaccatcataaatcaagtttatttttttaattaattgagcgaagctggaagcagatgatgaattagagtcaagatggctgcatgggggtctccggcacccacagcaggtggcaggaagcaggtcaccgcgagagtctattttaggaagcaaaaaaacacaattggtaaatttatcacttctggttgtgaagaggtggttttgcccaggcccagatctgaaagtgctctactgagcaaaacaacacctggacaatttgcgtttctaaaataaggcgaggctgaccgaaactgaaaaggctttttttaactatctgaatttcatttccaatcttagcttatcaactgctagtttgtgcaaacagcatatcaacttctaaactgcattcatttttaaagtaagatgtttaagaaattaaacagtcttagggagagtttatgactgtattcaaaaagttttttaaattagcttgttatcccttcatgtgataattaatctcaaatactttttcgatacctcagagcattattttcataatgactgtgttcacaatctttttaggttaactcgttttctctttgtgattaaggagaaacactttgatattctgatagagtggccttcattttagtatttttcaagaccacttttcaactactcactttaggataagttttaggtaaaatgtgcatcattatcctgaattatttcagttaagcatgttagttggtggcataagagaaaactcaatcagatagtgctgaagacaggactgtggagacaccttagaaggacagattctgttccgaatcaccgatgcggcgtcagcaggactggcctagcggaggctctgggagggtggctgccaggcccggcctgggctttgggtctccccggactacccagagctgggatgcgtggcttctgctgccgggccgactggctgctcaggccccagcccttgttaatggacttggaggaatgattccatgccaaagctttgcaaggctcgcagtgaccaggcgcccgacatggtaagagacaggcagccgccgctgctgcatttgcttctcttaaaactttgtatttgacgtcttatttccactagaaggggaactggtcttaattgcttgatgaagagcaggagactcatttatgtgagtcttttgagtgaccattgtctgggtcactcccatttaactttccctaaagcccatttgaaggagaggtcgcacgagctgctccacaacctctgaatggggatggcatgggtaatgatgcttgagaacataccaagccccactggcatcgcccttgtctaagtcattgactgtaggtcatcatcgcacccttgaaagtagcccatgccttccaaagcgatttatggtaaatggcagaattttaagtggcaaattcagataaaatgcatttcttggttgtttccaatgatgactgttatctagaccgcggtggagctccaattcgccctatagtgagtcgtattacgcgcgctcactggccgtcgttttacaacgtcgtgactgggaaaaccctggcgttacccaacttaatcgccttgcagcacatccccctttcgccagctggcgtaatagcgaagaggcccgcaccgatcgcccttcccaacagttgcgcagcctgaatggcgaatgggacgcgccctgtagcggcgcattaagcgcggcgggtgtggtggttacgcgcagcgtgaccgctacacttgccagcgccctagcgcccgctcctttcgctttcttcccttcctttctcgccacgttcgccggctttccccgtcaagctctaaatcgggggctccctttagggttccgatttagtgctttacggcacctcgaccccaaaaaacttgattagggtgatggttcacgtagtgggccatcgccctgatagacggtttttcgccctttgacgttggagtccacgttctttaatagtggactcttgttccaaactggaacaacactcaaccctatctcggtctattcttttgatttataagggattttgccgatttcggcctattggttaaaaaatgagctgatttaacaaaaatttaacgcgaattttaacaaaatattaacgcttacaatttaggtggcacttttcggggaaatgtgcgcggaacccctatttgtttatttttctaaatacattcaaatatgtatccgctcatgagacaataaccctgataaatgcttcaataatattgaaaaaggaagagtatgagtattcaacatttccgtgtcgcccttattcccttttttgcggcattttgccttcctgtttttgctcacccagaaacgctggtgaaagtaaaagatgctgaagatcagttgggtgcacgagtgggttacatcgaactggatctcaacagcggtaagatccttgagagttttcgccccgaagaacgttttccaatgatgagcacttttaaagttctgctatgtggcgcggtattatcccgtattgacgccgggcaagagcaactcggtcgccgcatacactattctcagaatgacttggttgagtactcaccagtcacagaaaagcatcttacggatggcatgacagtaagagaattatgcagtgctgccataaccatgagtgataacactgcggccaacttacttctgacaacgatcggaggaccgaaggagctaaccgcttttttgcacaacatgggggatcatgtaactcgccttgatcgttgggaaccggagctgaatgaagccataccaaacgacgagcgtgacaccacgatgcctgtagcaatggcaacaacgttgcgcaaactattaactggcgaactacttactctagcttcccggcaacaattaatagactggatggaggcggataaagttgcaggaccacttctgcgctcggcccttccggctggctggtttattgctgataaatctggagccggtgagcgtgggtctcgcggtatcattgcagcactggggccagatggtaagccctcccgtatcgtagttatctacacgacggggagtcaggcaactatggatgaacgaaatagacagatcgctgagataggtgcctcactgattaagcattggtaactgtcagaccaagtttactcatatatactttagattgatttaaaacttcatttttaatttaaaaggatctaggtgaagatcctttttgataatctcatgaccaaaatcccttaacgtgagttttcgttccactgagcgtcagaccccgtagaaaagatcaaaggatcttcttgagatcctttttttctgcgcgtaatctgctgcttgcaaacaaaaaaaccaccgctaccagcggtggtttgtttgccggatcaagagctaccaactctttttccgaaggtaactggcttcagcagagcgcagataccaaatactgtccttctagtgtagccgtagttaggccaccacttcaagaactctgtagcaccgcctacatacctcgctctgctaatcctgttaccagtggctgctgccagtggcgataagtcgtgtcttaccgggttggactcaagacgatagttaccggataaggcgcagcggtcgggctgaacggggggttcgtgcacacagcccagcttggagcgaacgacctacaccgaactgagatacctacagcgtgagctatgagaaagcgccacgcttcccgaagggagaaaggcggacaggtatccggtaagcggcagggtcggaacaggagagcgcacgagggagcttccagggggaaacgcctggtatctttatagtcctgtcgggtttcgccacctctgacttgagcgtcgatttttgtgatgctcgtcaggggggcggagcctatggaaaaacgccagcaacgcggcctttttacggttcctggccttttgctggccttttgctcacatgttctttcctgcgttatcccctgattctgtggataaccgtattaccgcctttgagtgagctgataccgctcgccgcagccgaacgaccgagcgcagcgagtcagtgagcgaggaagcggaagagcgcccaatacgcaaaccgcctctccccgcgcgttggccgattcattaatgcagctggcacgacaggtttcccgactggaaagcgggcagtgagcgcaacgcaattaatgtgagttagctcactcattaggcaccccaggctttacactttatgcttccggctcgtatgttgtgtggaattgtgagcggataacaatttcacacaggaaacagctatgaccatgattacgccaagcgcgcaattaaccctcactaaagggaacaaaagctg

What is claimed is:

1. A vector for reverting cell lines to a pro-B cell-like state or to a germline-like state, said vector comprising one or more immunoglobulin regions selected from the group consisting of V regions, D regions, and J regions, a 5′ flanking region operably linked 5′ to a 5′-most region and a 3′ flanking region operably linked 3′ to a 3′-most region wherein said 5′ and 3′ flanking regions are capable of facilitating homologous recombination of said immunoglobulin regions into a cell having a V(D)J rearranged immunoglobulin gene.

2. The vector of claim 1 wherein said vector comprises one or more fused DJ regions.

3. The vector of claim wherein said vector comprises two, three, four, five or more fused DJ regions.

4. The vector of claim 1 wherein said vector comprises six fused DJ regions.

5. The vector of claim 1 further comprising a 5′ flanking region and a 3′ flanking region.

6. The vector of claim 1 further comprising a selectable marker operably linked 3′ to said 5′ flanking region and 5′ to said 5′-most region.

7. The vector of claim 6 wherein said selectable marker is operably linked 5′ to the 5′-most DJH region.

8. The vector of claim 6 wherein said selectable marker is Eco-gpt.

9. A vector comprising a polynucleotide sequence encoding a recombination-promoting protein, or functional fragment, derivative, or variant thereof, selected from the group consisting of RAG-1 and RAG-2.

10. The vector of claim 9 wherein said vector is a plasmid vector.

11. The vector of claim 9 wherein said vector is a viral vector.

12. The vector of claim 11 wherein said viral vector is an adenoviral vector.

13. The vector of claim 9 selected from the group consisting of pCDNA3-RAG1 (SEQ ID NO: 40), pBI-TdT-GFP.RAG2 (SEQ ID NO: 42), pShuttle-RAG2 (SEQ ID NO: 52), pShuttle-GFP-RAG2 (SEQ ID NO: 53), pAdEasy-RAG2 (SEQ ID NO: 54), pAdEasy.1-GFP-RAG2 (SEQ ID NO: 55), and pAdEasy.2-GFP-RAG2 (SEQ ID NO: 56).

14. A method for generating immunoglobulin heavy and/or light chains, said method comprising the steps of:
(a) reverting a cell comprising a V(D)J rearranged immunoglobulin region by introducing into said cell a polynucleotide encoding V, D, and/or J regions of an immunoglobulin heavy and/or light chain, or fragment thereof, wherein said V, D, and/or J regions replace said V(D)J rearranged immunoglobulin region such that the introduced V, D, and/or J regions are in a pro-B cell-like or a germline-like state; and
(b) expressing in said reverted cell a polynucleotide sequence encoding a recombination-facilitating protein, or functional fragment, derivative or variant thereof, for a time and under conditions sufficient to induce rearrangement of the V, D, and/or J regions, wherein rearrangement of the V, D, and/or J regions facilitates expression of an immunoglobulin heavy and/or light chain.

15. A method for generating immunoglobulin heavy chains, said method comprising the steps of:
(a) reverting a cell comprising a V(D)J rearranged immunoglobulin region by introducing into said cell a polynucleotide encoding fused DJ regions of an immunoglobulin heavy chain, wherein said DJ regions replace said V(D)J rearranged immunoglobulin region such that the introduced fused DJ regions are in a pro-B cell-like state; and
(b) expressing in the reverted cell a polynucleotide sequence encoding a recombination-facilitating protein, or functional fragment thereof, for a time and under conditions sufficient to induce rearrangement of the germline V regions in the reverted cell with the introduced fused DJ regions,
wherein rearrangement of the V and fused DJ regions facilitates expression of an immunoglobulin heavy chain.

16. A method for generating immunoglobulin light chains, said method comprising the steps of:
(a) reverting a cell comprising a V(D)J rearranged immunoglobulin region by introducing into said cell a polynucleotide encoding J regions of an immunoglobulin light chain, wherein said J regions replace said V(D)J rearranged immunoglobulin region such that the introduced J regions are in a pro-B cell-like or a germline-like state; and
(b) expressing in the reverted cell a polynucleotide sequence encoding a recombination-facilitating protein, or functional fragment thereof, for a time and under conditions sufficient to induce rearrangement of the germline V regions in the reverted cell with the introduced J regions, wherein rearrangement of the V and J regions facilitates expression of an immunoglobulin light chain.

17. A method for generating libraries of cells that produce an array of immunoglobulins wherein each immunoglobulin exhibits a particular antigen specificity, said method comprising the steps of:
(a) providing a cell having a V(D)J rearranged immunoglobulin heavy and/or light chain region;
(b) introducing into the cell a polynucleotide encoding V, D, and/or J regions of an immunoglobulin heavy and/or light chain, or fragment thereof, wherein said V, D, and/or J regions replace said V(D)J rearranged immunoglobulin heavy and/or light chain region such that the introduced V, D, and/or J regions are in a pro-B cell-like or a germline-like state;
(c) culturing the cell under suitable conditions to generate a reverted cell population each member of which population comprises V, D, and/or J regions in a pro-B cell-like or a germline-like state;
(d) introducing into cells of the reverted cell population a polynucleotide sequence encoding a recombination-facilitating protein, or functional fragment, derivative or variant thereof; and
(e) culturing the resulting population of cells expressing the recombination-facilitating protein for a time and under conditions sufficient to induce rearrangement of the pro-B cell-like or germline-like V, D, and/or J regions, wherein rearrangement of the V, D, and/or J regions facilitates expression of an immunoglobulin heavy and/or light chain having a particular antigen specificity.

18. A method for identifying in a cell an immunoglobulin having a desired antigen specificity, said method comprising the steps of:
(a) reverting a cell comprising a V(D)J rearranged immunoglobulin region by introducing into said cell a polynucleotide encoding V, D, and/or J regions of an immunoglobulin heavy and/or light chain, or fragment thereof, wherein said V, D, and/or J regions replace said V(D)J rearranged immunoglobulin region such that the introduced V, D, and/or J regions are in a pro-B cell-like or a germline-like state;
(b) expressing in the reverted cell a polynucleotide sequence encoding a recombination-facilitating protein, or functional fragment, derivative, or variant thereof, for a time and under conditions sufficient to induce rearrangement of the pro-B cell-like or germline-like V, D, and/or J regions, wherein rearrangement of the V, D, and/or J regions facilitates expression of an immunoglobulin heavy and/or light chain; and
(c) screening the resulting V, D, and/or J region rearranged cells for an immunoglobulin having the desired antigen specificity.

19. A method for generating cell lines capable of producing immunoglobulins having a desired specificity, said method comprising the step of reverting a cell comprising a V(D)J rearranged immunoglobulin region by introducing into said cell a polynucleotide encoding V, D, a nd/or J regions of an immunoglobulin heavy and/or light chain gene, or fragment thereof, wherein said V, D, and/or J regions replace said V(D)J rearranged immunoglobulin region such that the introduced V, D, and/or J regions are in a pro-B cell-like or a germline-like state.

20. A method for generating cell lines capable of producing immunoglobulins having a desired specificity, said method comprising the step of reverting a cell comprising a V(D)J rearranged immunoglobulin region by introducing into said cell a polynucleotide encoding one or more fused DJ regions of an immunoglobulin heavy chain, wherein said fused DJ regions replace said V(D)J rearranged immunoglobulin region such that the introduced fused DJ regions are in a pro-B cell-like state.

21. The method of claim 20 wherein said introduced polynucleotide comprises two or more fused DJ regions.

22. The method of claim 20 wherein said introduced polynucleotide comprises at least three, four, or five fused DJ regions.

23. The method of claim 20 wherein said introduced polynucleotide comprises six fused DJ regions.

24. A method for producing immunoglobulins having a particular affinity or specificity for a target molecule, said method comprising the steps of:
(a) generating a reverted lymphoma cell line capable of producing immunoglobulins;
(b) expressing a polynucleotide encoding a recombination-facilitating protein, or functional fragment, derivative, or variant thereof, in the reverted lymphoma cell line for a time and under conditions sufficient to induce a rearrangement of the genes encoding the immunoglobulins which facilitates the generation of a library of lymphoma cells which produce an array of immunoglobulins wherein each immunoglobulin exhibits a particular affinity or specificity; and
(b) screening for immunoglobulins having a desired affinity or specificity.

25. A method for producing libraries of human monoclonal antibody-producing lymphoma cells, said method comprising the step of expressing in a reverted human lymphoma cell a polynucleotide encoding a recombination-facilitating protein for a time and under conditions sufficient to induce rearrangement of genes encoding human antibodies in the reverted lymphoma cells.

26. A method for generating a library of lymphoma cell lines of human origin, each human lymphoma cell line capable of producing fully-human immunoglobulins of a particular specificity, said method comprising the steps of:
(a) reverting a human lymphoma cell line comprising a V(D)J rearranged immunoglobulin region by introducing a polynucleotide encoding human V, D, and/or J regions of human immunoglobulin heavy and/or light chains into said human lymphoma cell line, wherein said V, D, and/or J regions replace said V(D)J rearranged immunoglobulin region such that the introduced V, D, and/or J regions are in a pro-B cell-like or germline-like state; and
(b) expressing in the reverted human lymphoma cell a polynucleotide sequence encoding a human recombination-facilitating protein, or a functional fragment, derivative or variant thereof, for a time and under conditions sufficient to facilitate rearrangement of immunoglobulin-encoding genes thus generating a library of human lymphoma cells each producing a fully-human immunoglobulin of a particular specificity.

27. A method for generating a library of lymphoma cell lines of human origin, each human lymphoma cell line capable of producing fully-human immunoglobulin heavy chains of a particular specificity, said method comprising the steps of:
(a) reverting a human lymphoma cell line comprising a V(D)J rearranged immunoglobulin region in by introducing a polynucleotide encoding fused DJ regions of a human immunoglobulin heavy chain into said cell line, wherein said DJ regions replace said V(D)J rearranged immunoglobulin region such that the introduced fused DJ regions are in a pro-B cell-like state;
(b) expressing in the reverted human cell a polynucleotide sequence encoding a human recombination-facilitating protein, or functional fragment, derivative or variant thereof, for a time and under conditions sufficient to induce rearrangement of the human lymphoma cell line germline V regions with the introduced fused DJ regions, wherein rearrangement of the V and fused DJ regions facilitates expression of a fully-human immunoglobulin heavy chain.

28. A method for generating a library of lymphoma cell lines of human origin, each human lymphoma cell line capable of producing fully-human immunoglobulin light chains of a particular specificity, said method comprising the steps of:
(a) reverting a human lymphoma cell comprising a V(D)J rearranged immunoglobulin region in by introducing a polynucleotide encoding J regions of a human immunoglobulin light chain into said human lymphoma cell, wherein said J regions replace said V(D)J rearranged immunoglobulin region such that the introduced J regions are in a pro-B cell-like or a germline-like state;
(b) expressing in the reverted human lymphoma cell line a polynucleotide sequence encoding a human recombination-facilitating protein, or functional fragment, derivative or variant thereof, for a time and under conditions sufficient to induce rearrangement of the germline V regions with the introduced J regions, wherein rearrangement of the V and J regions facilitates expression of a fully-human immunoglobulin light chain.

29. The method of any one of claims 14-23 and 26-28 wherein reversion of cells to a pro-B cell-like state is achieved by introducing a vector comprising a polynucleotide encoding fused DJ regions of an immunoglobulin heavy chain, or fragment thereof.

30. The method of any one of claims 14, 16-20, 26, and 28 wherein reversion of cells to a germline-like state is achieved by introducing a vector comprising a polynucleotide encoding V, D, and/or J regions of immunoglobulin heavy and/or light chains, or fragments thereof, wherein the V, D, and/or J regions are assembled in the vector in a germline-like state.

31. The method of any one of claims 14, 16-20, 26, and 28 wherein reversion of cells to a germline-like state is achieved by introducing a chromosome, or substantial portion thereof, wherein said chromosome encodes a complete germline heavy or light chain antibody repertoire or substantial portion thereof.

32. The method of claim 31 wherein said chromosome is a human chromosome selected from the group consisting of chromosomes 2, 14, and 22.

33. The method of claim 31 wherein said chromosome replaces the corresponding endogenous V(D)J rearranged chromosome.

34. The method of claim 31 wherein said chromosome is introduced into said V(D)J rearranged cell by a methodology selected from the group consisting of microcell-mediated chromosome transfer, T cell-fusion, micro-injection, and yeast protoplast fusion.

35. The method of claim 31 wherein said cells comprising V(D)J rearranged immunoglobulin regions are reverted to a germline-like configuration by fusing a B cell line with precursor B cells isolated from human bone marrow or cord blood.

36. The method of claim 31 wherein said cell is reverted to a germline-like configuration by fusing a B cell line with T cells isolated from human blood.

37. The method of claim 31 wherein said cell is are reverted to a germline-like configuration by fusing B cell lines with rodent/human somatic cell hybrids carrying a single human chromosome.

38. The method of any one of claims 14-16 and 24 wherein the immunoglobulin heavy and/or light chain regions are human immunoglobulin heavy and/or light chain regions.

39. The method of any one of claims 14-16 and 24 wherein said immunoglobulin is from an animal selected from the group consisting of primate, sheep, pig, cow, horse, donkey, poultry, rabbit, mouse, rat, guinea pig, hamster, dog, and cat.

40. The method of any one of claims 14-18, 24-28 wherein said recombination-facilitating protein, or functional fragment, derivative, or variant thereof, is selected from the group consisting of RAG-1 and RAG-2.

41. The method of any one of claims 14-18, 24-28 wherein said polynucleotide encoding said recombination-facilitating protein, or functional fragment, derivative, or variant thereof, is introduced into said cell on an adenoviral vector.

42. The method of claim 41 wherein said recombination-facilitating protein, or functional fragment, derivative, or variant thereof, is from an animal selected from the group consisting of primates, livestock animals, laboratory test animals, companion animals, avian animals, reptilian animals, amphibian animals, and aquatic animals.

43. The method of claim 41 wherein said recombination-facilitating protein is human RAG-1 as depicted herein in SEQ ID NO: 2 or a functional fragment, derivative, or variant thereof.

44. The method of claim 41 wherein said recombination-facilitating protein is human RAG-2 as depicted herein in SEQ ID NO: 4 or a functional fragment, derivative, or variant thereof.

45. The method of claim 43 or 44 wherein said recombination-facilitating protein, or functional fragment, derivative or variant thereof, is expressed transiently for a time and under conditions sufficient to achieve recombination in said reverted cell.

46. The method of claim 43 or 44 wherein said recombination-facilitating protein, or functional fragment, derivative or variant thereof, is expressed constitutively and wherein expression is under the control of an inducible transcriptional promoter.

47. The method of any one of claims 15-29 wherein said immunoglobulin-producing cells are selected from the group consisting of lymphocytes, lymphocyte cell lines, B lymphocytes, B lymphocyte cell lines, B cell lymphoma cells, and B cell lymphoma cell lines.

48. The method of any one of claims 15-29 wherein said immunoglobulin-producing cells are a human B cell line.

49. The method of any one of claims 15-29 wherein said cells are generated from patients with Burkitt's lymphoma.

50. The method of any one of claims 15-29 wherein said cells are selected from the group consisting of Ramos, Ramos sub-line 2G6, Burkitt's lymphoma cell line BL2, Burkitt's lymphoma cell line BL16, and BL16 sub-line CL-01.

51. An immunoglobulin heavy and/or light chain generated by any one of the methods of any one of claims 15-17 and 25.

52. An immunoglobulin fragment generated from the immunoglobulin heavy and/or light chain of claim 51 wherein said immunoglobulin fragment is selected from the group consisting of an Fab, an F(ab′)2, an Fc, and scFv fragment.

53. The method of any one of claims 18, 20-24, and 26-29 further comprising the step of treating said cells expressing said immunoglobulin heavy and/or light chains, or fragments thereof, with an agonist to induce switching from a first antibody isotype to a second antibody isotype wherein said first antibody isotype is selected from the group consisting of IgM, IgD, IgG1, IgG2, IgG3, IgG4, IgE, IgA1 and IgA2 and wherein said second antibody isotype is selected from the group consisting of IgD, IgG1, IgG2, IgG3, IgG4, IgE, IgA1 and IgA2.

54. The method of claim 53 wherein said agonist is selected from the group consisting of a ligand for CD40, a ligand for the B cell receptor, a B cell mitogen, a cytokines, bacterial DNA, a synthetic oligonucleotide containing unmethylated CpG dinucleotides, anti-CD19, and anti-CD21.

55. The method of any one of claims 18, 20-24, and 25-29 further comprising the step of subjecting to mutagenesis said cells or libraries of cells expressing one or more immunoglobulins, or fragments thereof.

56. The method of claim 55 wherein said mutagenesis step comprises introducing into the cell and/or library of cells a polynucleotide encoding activation-induced cytidine deaminase (AICD) or a functional fragment, derivative or variant thereof.

57. The method of claim 55 wherein said mutagenesis step is achieved by endogenous expression of an activation-induced cytidine deaminase (AICD).

58. The method of claim 57 wherein said endogenous expression of said activation-induced cytidine deaminase (AICD) is constitutive.

59. The method of claim 57 wherein said endogenous expression of said activation-induced cytidine deaminase (AICD) is induced.

60. The method of claim 58 further comprising the step of introducing into the cells and/or libraries of cells a polynucleotide encoding Terminal Deoxynucleotidyltransferase (TdT) or a functional fragment, derivative or variant thereof.
